(19) United States
(12) Patent Application Publication
(10) Pub. No.: US 2014/0141488 A1
(43) Pub. Date: May 22, 2014

(54) SEQUENCE OF 55 NEW FOUND PROTEINS AND THEIR APPLICATION

(71) Applicant: Kieu Hoang, Agoura Hills, CA (US)

(72) Inventor: Kieu Hoang, Agoura Hills, CA (US)

(21) Appl. No.: 13/756,034

(22) Filed: Jan. 31, 2013

Related U.S. Application Data
(60) Provisional application No. 61/593,164, filed on Jan. 31, 2012.
(60) Provisional application No. 61/593,183, filed on Jan. 31, 2012.
(60) Provisional application No. 61/593,196, filed on Jan. 31, 2012.
(60) Provisional application No. 61/648,281, filed on May 17, 2012.
(60) Provisional application No. 61/692,273, filed on Aug. 23, 2012.
(60) Provisional application No. 61/710,930, filed on Oct. 8, 2012.

(51) Int. Cl. C07K 14/76; C07K 14/75; C07K 14/745

(52) U.S. Cl. CPC C07K 14/76; C07K 14/7455; C07K 14/75
USPC 435/194; 530/350; 530/381; 530/382; 530/387.1; 530/362; 530/383; 530/395

(57) ABSTRACT

Sequence of 55 New Found Proteins—2 new proteins in Cryoprecipitate—8 new proteins in Fraction III—8 new proteins in Prothrombin Complex Concentrate—2 new found proteins in AFCC (Fraction 33)—3 new proteins in Fraction IV and 4 new found proteins in AFOD (Fraction 42)—2 in HemoRAAS®, 3 in FibroRAAS®, 5 in GammaRAAS®, 3 in AFCC®, 1 in Fraction 3-2, 2 in Fraction 3, 4 in FibingluRAAS® (Thrombin), 3 in AFOD®, 1 in AlbuRAAS®, 1 in FibingluRAAS® (High concentrate Fibrinogen), 1 in AFCC® (From fraction IV), 2 in Transferrin from Human Plasma and their name KH1 through KH55, and 16 existing proteins in which good KH healthy cells exists and their application.

### CROSS REFERENCE TO RELATED APPLICATIONS

[0001] The benefit under 35 USC 120 is hereby claimed of the filing dates of provisional application No. 61/593,164, filed on Jan. 31, 2012, provisional application No. 61/593,183, filed on Jan. 31, 2012, provisional application No. 61/593,196, filed on Jan. 31, 2012, provisional application No. 61/648,281, filed on May 17, 2012, provisional application No. 61/692,273, filed on Aug. 23, 2012 and provisional application No. 61/710,930, filed on Oct. 8, 2012, all of which are hereby incorporated herein by reference in their entireties.

### BACKGROUND

[0002] As we know there are 100,000 proteins in a human being, and each of the protein has its own function to interact with each other or one another to provide all necessary elements to keep the human being healthy. Proteins are known to treat certain diseases, to provide coagulant factors and immune deficiency.

### INVENTION

[0003] In order to discover more proteins to cure many diseases that are not curable at the moment. The inventor has discovered 52 newfound proteins:
[0004] 1) 2 new proteins in Cryoprecipitate
[0005] 2) 8 new proteins in Fraction III
[0006] 3) 8 new proteins in Prothrombin Complex Concentrate
[0007] 4) 2 new found proteins in AFCC
[0008] 5) 3 new proteins in Fraction IV
[0009] 6) 4 new found proteins in AFOD
[0010] 7) 2 new proteins in HemoRAAS® (Human Factor VIII)
[0011] 8) 3 new proteins in FibroRAAS® (Human Fibrinogen)
[0012] 9) 5 new proteins in GammaRAAS® (Human Immunoglobulin)
[0013] 10) 3 new found proteins in AFCC®
[0014] 11) 1 new proteins in Fraction 3-2
[0015] 12) 2 new found proteins in Fraction 3
[0016] 13) 4 new found proteins in FibingluRAAS® Human Thrombin
[0017] 14) 3 new found protein in AFOD®
[0018] 15) 1 new found protein in AlbuRAAS® (Human Albumin)
[0019] 16) 1 new found protein in FibingluRAAS® High Concentrate Human Fibrinogen
[0020] Originally we have found only 21 new proteins however when we go into further process to segregate each group of protein in the Fraction 33 from fraction III (AFCC) we have found 2 more new proteins. And the same thing happened with the fraction 42 from fraction IV (AFOD) we have found an additional 4 new proteins. More new proteins may be found when we go into the further process to segregate proteins from fraction 31, 32 or 41, 43 (under different patent application) for example. In fact, we found an additional 26 new proteins. Of this 26 we have been able to identify the sequence for 25 of them. One additional protein found in Human Immunoglobulin is still under investigation for its sequence. The function of which is still under investigation. More new proteins may be found when we go into the further process to segregate proteins from different fractions (under different patent application) for example.
   1) 2 new proteins which have been discovered in cryoprecipitate have been named KH1 and KH2. The function of which are under investigation. See FIG. 7A—Protein Sequence of Cryoprecipitate
   2) 8 new found proteins which have been discovered in Fraction III named KH3, KH4, KH5, KH6, KH7, KH8, KH9 and KH10. The function of which are under investigation. See FIG. 8A—Fraction III. See also FIG. 8B—Fraction III.
   3) 8 new proteins which have been discovered in Prothrombin Complex Concentrate named KH11, KH12, KH13, KH14, KH15, KH16, KH17 and KH18. The function of these proteins are being investigated. See FIG. 9A—Prothrombin Complex Concentrate. See FIG. 9B—Prothrombin Complex Concentrate
   4) 2 new proteins which have been discovered in AFCC (Fraction 33 under different patent application for the AFCC process) named KH19 and KH20. The function of these proteins are being investigated. See FIG. 10A—AFCC. See FIG. 10B—AFCC See FIG. 10C—AFCC
   5) 3 new proteins which have been discovered in Fraction IV named KH21, KH22 and KH23. The function of these proteins are being investigated. FIG. 11—Fraction IV
   6) 4 new proteins which have been discovered in AFOD (Fraction 42 under different patent application for the AFOD process) named KH24, KH25, KH26 and KH27. The function of these proteins are being investigated. See FIG. 12A—AFOD. See FIG. 12 B—AFOD. See FIG. 12C—AFOD

### BRIEF DESCRIPTION OF THE DRAWINGS

[0021] FIG. 1—ATIII

[0022] FIG. 2—CP98

[0023] FIG. 3—TF

[0024] FIG. 4 Alpha 1 AT

[0025] FIG. 5 FR IV HA (after pasteurization)

[0026] FIG. 6—AFCC

[0027] FIG. 7A—Protein Sequence of Cryoprecipitate

[0028] FIG. 7B—Protein Sequence of Cryoprecipitate

[0029] FIG. 8A—Fraction III

[0030] FIG. 8B—Fraction III

[0031] FIG. 9A—Prothrombin Complex Concentrate

[0032] FIG. 9B—Prothrombin Complex Concentrate

[0033] FIG. 10A—AFCC

[0034] FIG. 10B—AFCC

[0035] FIG. 10C—AFCC

[0036] FIG. 11—Fraction IV

[0037] FIG. 12A—AFOD

[0038] FIG. 12B—AFOD

[0039] FIG. 12C—AFOD

[0040] FIG. 13A—2D Electrophoresis of Anti Thrombin III

[0041] FIG. 13B—2D Electrophoresis of CP98

[0042] FIG. 13C—2D Electrophoresis of Transferrin

[0043] FIG. 13D—2D Electrophoresis of α1-Anti Trypsin

[0044] FIG. 13E—2D Electrophoresis of Human Albumin after pasteurization from Fraction IV

[0045] FIG. 13F—2D Electrophoresis of AFCC®

[0046] The following are the sequence of these 27 newfound proteins in Cryoprecipitate, Fraction III, Prothrombin Complex Concentrate, AFCC (fraction 33), fraction IV & AFOD (fraction 42).

### 1—Cryoprecipitate

[0047] The sequence of these 2 new found proteins and their function are being investigated.

| | | | |
|---|---|---|---|
| | 1/A1 | | Instr./Gel |
| | | | Origin |
| | [1] Sample Project | | Instrument |
| | 20110503 | | Sample |
| | | | Name |
| Protein Name- | KH1 (SEQ ID NO. KH1) | Accession No. | |

| | |
|---|---|
| nitric oxide synthase 1 (neuronal), | gi\|119618515 |
| isoform CRA_b [Homo sapiens] | |

[0048] Peptide Information

| Calc. Mass | Obsrv. Mass | ±da | ±ppm | Start Seq. | End Seq. | Sequence |
|---|---|---|---|---|---|---|
| 805.4236 | 805.3599 | −.0637 | −79 | 988 | 994 | IMTQQGK |
| 821.4185 | 821.4248 | .0063 | 8 | 988 | 994 | IMTQQGK |
| 848.4625 | 848.4198 | −.0427 | −50 | 47 | 53 | LQVFDAR |
| 851.4158 | 851.4299 | .0141 | 17 | 881 | 886 | SFWQQR |
| 865.427 | 865.416 | −.011 | −13 | 367 | 374 | LMGQAMAK |
| 865.427 | 865.416 | −.011 | −13 | 367 | 374 | LMGQAMAK |
| 887.4832 | 887.3946 | −.0886 | −100 | 686 | 692 | VELLEER |
| 887.4832 | 887.3946 | −.0886 | −100 | 686 | 692 | VELLEER |
| 899.3629 | 899.3597 | −.0032 | −4 | 1045 | 1052 | DTDEVFSS |
| 903.4166 | 903.3696 | −.047 | −52 | 480 | 488 | SSGDGPDLR |
| 903.4166 | 903.3696 | −.047 | −52 | 480 | 488 | SSGDGPDLR |
| 907.4488 | 907.4044 | −.0444 | −49 | 237 | 243 | MNLDMRK |
| 929.3417 | 929.41 | .0683 | 73 | 220 | 226 | DYCDNSR |
| 931.4955 | 931.4161 | −.0794 | −85 | 341 | 349 | GTNGTPTKR |
| 1037.5231 | 1037.5519 | .0288 | 28 | 367 | 375 | LMGQAMAKR |
| 1103.5439 | 1103.4888 | −.0551 | −50 | 576 | 585 | ANNSLIS |
| | | | | | | NDR |
| 1103.5439 | 1103.4888 | −.0551 | −50 | 576 | 585 | ANNSLIS |
| | | | | | | NDR |
| 1163.5725 | 1163.5321 | −.0404 | −35 | 1 | 9 | MERLEEV |
| | | | | | | NK |
| 1167.6256 | 1167.5096 | −.116 | −99 | 378 | 388 | ATILYATE |
| | | | | | | TGK |

immunoglobulin heavy chain variable region [Homo sapiens gi|10636642]

[0049] Peptide Information

| Calc. Mass | Obsrv. Mass | ±da | ±ppm | Start Seq. | End Seq. | Sequence |
|---|---|---|---|---|---|---|
| 815.3981 | 815.3336 | −.0645 | −79 | 1 | 6 | AMHWVR |
| 824.3897 | 824.3629 | −.0268 | −33 | 27 | 33 | NYADSVR |
| 870.4581 | 870.5102 | .0521 | 60 | 34 | 40 | GRFTFSR |
| 891.4352 | 891.429 | −.0062 | −7 | 67 | 74 | ALDCSLGR |
| 1037.5123 | 1037.5519 | .0396 | 38 | 27 | 35 | NYADSVRGR |

| | |
|---|---|
| fibrinogen gamma | gi\|223170 |

[0050] Peptide Information

| | | | | Start | | |
|---|---|---|---|---|---|---|
| Calc. Mass | Obsrv. Mass | ±da | ±ppm | Seq. | End Seq. | Sequence |
| 842.4229 | 842.4064 | −.0165 | −20 | 375 | 380 | WYSMKK |
| 842.4229 | 842.4064 | −.0165 | −20 | 375 | 380 | WYSMKK |
| 851.441 | 851.4299 | −.0111 | −13 | 207 | 212 | NWIQYK |
| 909.442 | 909.4585 | .0165 | 18 | 89 | 95 | MLEEIMK |
| 979.5359 | 979.4785 | −.0574 | −59 | 206 | 212 | KNWIQYK |
| 1034.5266 | 1034.531 | .0044 | 4 | 267 | 275 | VGPEADKYR |
| 1037.537 | 1037.5519 | .0149 | 14 | 88 | 95 | KMLEEIMK |
| 1150.5085 | 1150.5156 | .0071 | 6 | 257 | 266 | TSTADYAMFK |
| 1194.4878 | 1194.4916 | .0038 | 3 | 6 | 14 | DNCCILDER |

| | |
|---|---|
| Chain I, Crystal Structure Of Human Fibrinogen | gi\|237823922 |

[0051] Protein Group

| | |
|---|---|
| Chain C, Crystal Structure Of Human Fibrinogen | gi\|237823916 |
| Chain F, Crystal Structure Of Human Fibrinogen | gi\|237823919 |
| Chain L, Crystal Structure Of Human Fibrinogen | gi\|237823925 |

[0052] Peptide Information

| Calc. Mass | Obsrv. Mass | ±da | ±ppm | Start Seq. | End Seq. | Sequence |
|---|---|---|---|---|---|---|
| 842.4229 | 842.4064 | −.0165 | −20 | 376 | 381 | WYSMKK |
| 842.4229 | 842.4064 | −.0165 | −20 | 376 | 381 | WYSMKK |
| 851.441 | 851.4299 | −.0111 | −13 | 207 | 212 | NWIQYK |
| 909.442 | 909.4585 | .0165 | 18 | 89 | 95 | MLEEIMK |
| 979.5359 | 979.4785 | −.0574 | −59 | 206 | 212 | KNWIQYK |
| 1034.5266 | 1034.531 | .0044 | 4 | 267 | 275 | VGPEADKYR |
| 1037.537 | 1037.5519 | .0149 | 14 | 88 | 95 | KMLEEIMK |

| | |
|---|---|
| fibrinogen gamma chain, isoform | gi\|119625314 |
| CRA_e [Homo sapiens] | |

| Calc. Mass | Obsrv. Mass | ±da | ±ppm | Start | End | Sequence |
|---|---|---|---|---|---|---|
| 842.4229 | 842.4064 | −.0165 | −20 | 384 | 389 | WYSMKK |
| 842.4229 | 842.4064 | −.0165 | −20 | 384 | 389 | WYSMKK |
| 851.441 | 851.4299 | −.0111 | −13 | 215 | 220 | NWIQYK |
| 909.442 | 909.4585 | .0165 | 18 | 115 | 121 | MLEEIMK |
| 979.5359 | 979.4785 | −.0574 | −59 | 214 | 220 | KNWIQYK |
| 1034.5266 | 1034.531 | .0044 | 4 | 275 | 283 | VGPEADKYR |
| 1037.537 | 1037.5519 | .0149 | 14 | 114 | 121 | KMLEEIMK |
| 1150.5085 | 1150.5156 | .0071 | 6 | 265 | 274 | TSTADYAMFK |
| 1194.4878 | 1194.4916 | .0038 | 3 | 32 | 40 | DNCCILDER |

| | |
|---|---|
| fibrinogen gamma chain, isoform | gi\|1196253 |
| sapiens] | |

| Calc. Mass | Obsrv. Mass | ±da | ±ppm | Start Seq. | End Seq. | Sequence |
|---|---|---|---|---|---|---|
| 842.4229 | 842.4064 | −.0165 | −20 | 385 | 390 | WYSMKK |
| 842.4229 | 842.4064 | −.0165 | −20 | 385 | 390 | WYSMKK |
| 851.441 | 851.4299 | −.0111 | −13 | 216 | 221 | NWIQYK |
| 909.442 | 909.4585 | .0165 | 18 | 98 | 104 | MLEEIMK |
| 979.5359 | 979.4785 | −.0574 | −59 | 215 | 221 | KNWIQYK |
| | 979.4785 | | | | | |
| 1034.5266 | 1034.531 | .0044 | 4 | 276 | 284 | VGPEADKYR |
| 1037.537 | 1037.5519 | .0149 | 14 | 97 | 104 | KMLEEIMK |
| 1150.5085 | 1150.5156 | .0071 | 6 | 266 | 275 | TSTADYAMFK |
| 1194.4878 | 1194.4916 | .0038 | 3 | 15 | 23 | DNCCILDER |

| | |
|---|---|
| fibrinogen gamma chain, isoform | gi\|119625320 |
| GRA_j [Homo sapiens] | |

[0053] Peptide Information

| | | | | Start | | |
|---|---|---|---|---|---|---|
| Calc. Mass | Obsrv. Mass | ±da | ±ppm | Seq. | End Seq. | Sequence |
| 842.4229 | 842.4064 | −.0165 | −20 | 387 | 392 | WYSMKK |
| 842.4229 | 842.4064 | −.0165 | −20 | 387 | 392 | WYSMKK |
| 851.441 | 851.4299 | −.0111 | −13 | 233 | 238 | NWIQYK |
| 909.442 | 909.4585 | .0165 | 18 | 115 | 121 | MLEEIMK |
| 979.5359 | 979.4785 | −.0574 | −59 | 232 | 238 | KNWIQYK |
| 1034.5266 | 1034.531 | .0044 | 4 | 293 | 301 | VGPEADKYR |
| 1037.537 | 1037.5519 | .0149 | 14 | 114 | 121 | KMLEEIMK |
| 1150.5085 | 1150.5156 | .0071 | 6 | 283 | 292 | TSTADYAMFK |
| 1194.4878 | 1194.4916 | .0038 | 3 | 32 | 40 | DNCCILDER |

[0054] Protein Group

| | |
|---|---|
| Chain C, A Fragment Of Streptococcal M1 Protein In | gi\|328877090 |
| Complex With Human Fibrinogen | |
| Chain C, Bc1 Fragment Of Streptococcal M1 Protein In | gi\|328877076 |
| Complex With Human Fibrinogen | |
| Chain C, Crystal Structure Of Bbetad432a Variant | gi\|220702428 |
| Fibrinogen Fragment D With The Peptide Ligand | |
| Gly-His-Arg-Pro-Amide | |
| Chain C, Crystal Structure Of Crosslinked Fragment D | gi\|2781215 |
| Chain C, Crystal Structure Of Fibrinogen Fragment D | gi\|2781209 |
| Chain C, Crystal Structure Of Fragment D From Human | gi\|5542261 |
| Fibrinogen With The Peptide Ligand | |
| Gly-His-Arg-Pro-Amide | |
| Chain C, Crystal Structure Of Fragment Double-D From | gi\|5542245 |
| Human | |
| Fibrin | |
| Chain C, Crystal Structure Of Fragment Double-D From | gi\|5542251 |
| Human Fibrin With The Peptide Ligand | |
| Gly-His-Arg-Pro-Amide | |
| Chain C, Crystal Structure Of Fragment Double-D From | gi\|3891882 |
| Human Fibrin With Two Different Bound Ligands | |
| Chain F, A Fragment Of Streptococcal M1 Protein In | gi\|328877093 |
| Complex With Human Fibrinogen | |
| Chain F, Bc1 Fragment Of Streptococcal M1 Protein In | gi\|328877079 |
| Complex With Human Fibrinogen | |
| Chain F, Crystal Structure Of Bbetad432a Variant | gi\|220702431 |
| Fibrinogen Fragment D With The Peptide Ligand | |
| Gly-His-Arg-Pro-Amide | |
| Chain F, Crystal Structure Of Crosslinked Fragment D | gi\|2781218 |
| Chain F, Crystal Structure Of Fibrinogen Fragment D | gi\|2781212 |
| Chain F, Crystal Structure Of Fragment D From Human | gi\|5542264 |
| Gly-His-Arg-Pro-Amide | |
| Chain F, Crystal Structure Of Fragment Double-D From | gi\|5542248 |
| Human Fibrin | |
| Human Fibrin With The Peptide Ligand | |
| Gly-His-Arg-Pro-Amide | |
| Chain F, Crystal Structure Of Fragment Double-D From | gi\|3891885 |
| Human Fibrin With Two Different Bound Ligands | |
| Complex With Human Fibrinogen | |
| Complex With Human Fibrinogen | |

[0055] Peptide Information

| | | | | Start | | |
|---|---|---|---|---|---|---|
| Calc. Mass | Obsrv. Mass | ±da | ±ppm | Seq. | End Seq. | Sequence |
| 842.4229 | 842.4064 | −.0165 | −20 | 289 | 294 | WYSMKK |
| 842.4229 | 842.4064 | −.0165 | −20 | 289 | 294 | WYSMKK |
| 851.441 | 851.4299 | −.0111 | −13 | 120 | 125 | NWIQYK |
| 909.442 | 909.4585 | .0165 | 18 | 2 | 8 | MLEEIMK |
| 979.5359 | 979.4785 | −.0574 | −59 | 119 | 125 | KNWIQYK |
| 1034.5266 | 1034.531 | .0044 | 4 | 180 | 188 | VGPEADKYR |
| 1037.537 | 1037.5519 | .0149 | 14 | 1 | 8 | KMLEEIMK |
| 1150.5085 | 1150.5156 | .0071 | 6 | 170 | 179 | TSTADYAMFK |

| | |
|---|---|
| nitric oxide synthase 1 (neuronal), isoform | gi\|119618514 |
| CRA_a [Homo sapiens] | |

[0056] Peptide Information

| Calc. | Obsrv. | | | Start | End | |
|---|---|---|---|---|---|---|
| Mass | Mass | ±da | ±ppm | Seq. | Seq. | Sequence |
| 805.4236 | 805.3599 | −.0637 | −79 | 1022 | 1028 | IMTQQGK |
| 821.4185 | 821.4248 | .0063 | 8 | 1022 | 1028 | IMTQQGK |
| 848.4625 | 848.4198 | −.0427 | −50 | 47 | 53 | LQVFDAR |
| 851.4158 | 851.4299 | .0141 | 17 | 915 | 920 | SFWQQR |
| 865.427 | 865.416 | −.011 | −13 | 367 | 374 | LMGQAMAK |
| 865.427 | 865.416 | −.011 | −13 | 367 | 374 | LMGQAMAK |
| 887.4832 | 887.3946 | −.0886 | −100 | 720 | 726 | VELLEER |
| 887.4832 | 887.3946 | −.0886 | −100 | 720 | 726 | VELLEER |
| 899.3629 | 899.3597 | −.0032 | −4 | 1079 | 1086 | DTDEVFSS |
| 903.4166 | 903.3696 | −.047 | −52 | 514 | 522 | SSGDGP |
| | | | | | | DLR |
| 903.4166 | 903.3696 | −.047 | −52 | 514 | 522 | SSGDGP |
| | | | | | | DLR |
| 907.4488 | 907.4044 | −.0444 | −49 | 237 | 243 | MNLDMRK |
| 929.3417 | 929.41 | .0683 | 73 | 220 | 226 | DYCDNSR |
| 931.4955 | 931.4161 | −.0794 | −85 | 341 | 349 | GTNGTPT |
| | | | | | | KR |
| 1037.5231 | 1037.5519 | .0288 | 28 | 367 | 375 | LMGQAM |
| | | | | | | AKR |
| 1103.5439 | 1103.4888 | −.0551 | −50 | 610 | 619 | ANNSLIS |
| | | | | | | NDR |
| 1103.5439 | 1103.4888 | −.0551 | −50 | 610 | 619 | ANNSLIS |
| | | | | | | NDR |
| 1163.5725 | 1163.5321 | −.0404 | −35 | 1 | 9 | MERLEEV |
| | | | | | | NK |
| 1167.6256 | 1167.5096 | −.116 | −99 | 378 | 388 | ATILYATE |
| | | | | | | TGK |

| | |
|---|---|
| fibrinogen gamma chain isoform | gi\|70906437 |
| gamma-A precursor | |
| [Homo sapiens] | |

[0057] Protein Group

| | |
|---|---|
| Fibrinogen gamma chain [Homo sapiens] | gi\|18203820 |
| Fibrinogen gamma chain [Homo sapiens] | gi\|13937874 |
| PRO2061 [Homo sapiens] | gi\|6650830 |
| fibrinogen gamma chain, isoform CRA_m | gi\|1196253 |
| sapiens] | |
| [Homo sapiens] | |
| fibrinogen, gamma polypeptide [Homo | |
| sapiens] | |
| unnamed protein product [Homo sapiens] | gi\|158255084 |

[0058] Peptide Information

| Calc. | Obsrv. | | | Start | End | |
|---|---|---|---|---|---|---|
| Mass | Mass | ±da | ±ppm | Seq. | Seq. | Sequence |
| 842.4229 | 842.4064 | −.0165 | −20 | 402 | 407 | WYSMKK |
| 842.4229 | 842.4064 | −.0165 | −20 | 402 | 407 | WYSMKK |
| 851.441 | 851.4299 | −.0111 | −13 | 233 | 238 | NWIQYK |
| 909.442 | 909.4585 | .0165 | 18 | 115 | 121 | MLEEIMK |
| 979.5359 | 979.4785 | −.0574 | −59 | 232 | 238 | KNWIQYK |
| 1034.5266 | 1034.531 | .0044 | 4 | 293 | 301 | VGPEADK |
| | | | | | | YR |
| 1037.537 | 1037.5519 | .0149 | 14 | 114 | 121 | KMLEEIMK |
| 1150.5085 | 1150.5156 | .0071 | 6 | 283 | 292 | TSTADYA |
| | | | | | | MFK |
| 1194.4878 | 1194.4916 | .0038 | 3 | 32 | 40 | DNCCILD |
| | | | | | | ER |

| | |
|---|---|
| hCG2000669, isoform CRA_a | gi\|119615136 |
| [Homo sapiens] | |

[0059] Protein Group

| | |
|---|---|
| Homeobox B6 [Homo sapiens] | gi\|15779175 |
| RecName: Full = Homeobox protein Hox-B6; AltName: | gi\|116242515 |
| Full = Homeobox protein Hox-2.2; | |
| AltName: Full = Homeobox protein | |
| Hox-2B; AltName: Full = Homeobox | |
| protein | |
| Hu-2 | |
| hCG2000669, isoform CRA_a [Homo sapiens] | gi\|119615135 |
| hCG2000669, isoform CRA_a [Homo sapiens] | gi\|119615137 |
| hCG2000669, isoform CRA_a [Homo sapiens] | gi\|119615134 |
| homeobox B6 [Homo sapiens] | gi\|11138932 |
| homeobox protein Hox-B6 [Homo sapiens] | gi\|23503237 |
| homeobox protein [Homo sapiens] | gi\|6706217 |
| unnamed protein product [Homo sapiens] | gi\|158257832 |

[0060] Peptide Information

| Calc. | Obsrv. | | | Start | End | |
|---|---|---|---|---|---|---|
| Mass | Mass | ±da | ±ppm | Seq. | Seq. | Sequence |
| 823.3251 | 823.3582 | .0331 | 40 | 106 | 112 | SDCAQDK |
| 863.4522 | 863.4052 | −.047 | −54 | 192 | 197 | IWFQNR |
| 865.3951 | 865.416 | .0209 | 24 | 164 | 169 | EFHYNR |
| 865.3951 | 865.416 | .0209 | 24 | 164 | 169 | EFHYNR |
| 951.42 | 951.4047 | −.0153 | −16 | 105 | 112 | KSDCAQDK |
| 951.42 | 951.4047 | −.0153 | −16 | 105 | 112 | KSDCAQDK |
| 1019.5533 | 1019.4705 | −.0828 | −81 | 192 | 198 | IWFQNRR |
| 1023.5356 | 1023.5074 | −.0282 | −28 | 156 | 163 | YQTLELEK |

| | |
|---|---|
| Chain F, Crystal Structure Of D-Dimer | gi\|162330006 |
| From Human Fibrin Complexed | |
| With Met-His-Arg-Pro-Tyr-Amide. | |

[0061] Peptide Information

| | | | | Start | | |
|---|---|---|---|---|---|---|
| Calc. Mass | Obsrv. Mass | ±da | ±ppm | Seq. | End Seq. | Sequence |
| 842.4229 | 842.4064 | −.0165 | −20 | 289 | 294 | WYSMKK |
| 842.4229 | 842.4064 | −.0165 | −20 | 289 | 294 | WYSMKK |
| 851.441 | 851.4299 | −.0111 | −13 | 120 | 125 | NWIQYK |
| 909.442 | 909.4585 | .0165 | 18 | 2 | 8 | MLEEIMK |
| 979.5359 | 979.4785 | −.0574 | −59 | 119 | 125 | KNWIQYK |
| 1034.5266 | 1034.531 | .0044 | 4 | 180 | 188 | VGPEADKYR |
| 1037.537 | 1037.5519 | .0149 | 14 | 1 | 8 | KMLEEIMK |
| 1150.5085 | 1150.5156 | .0071 | 6 | 170 | 179 | TSTADYAMFK |

| | |
|---|---|
| inactive phospholipase D5 isoform 1 | gi\|307775443 |
| [Homo sapiens] | |

[0062] Protein Group

| | |
|---|---|
| PLDc protein [Homo sapiens] | gi\|46392519 |
| Phospholipase D family, member 5 [Homo sapiens] | gi\|71682896 |
| Phospholipase D family, member 5 [Homo sapiens] | gi\|71682143 |
| Phospholipase D family, member 5 [Homo sapiens] | gi\|71682147 |
| RecName: Full = Inactive phospholipase | |
| D5; | |
| Short = Inactive PLD 5; AltName: Full = Inactive | gi\|152112223 |
| choline | |
| phosphatase 5; AltName: Full = Inactive | |
| phosphatidylcholine-hydrolyzing | |
| phospholipase D5; AltName: Full = PLDc | |
| inactive phospholipase D5 isoform 2 [Homo sapiens] | gi\|307775435 |
| inactive phospholipase D5 isoform 3 [Homo sapiens] | gi\|307775437 |
| phospholipase D family, member 5 [Homo sapiens] | \|55960909 |
| phospholipase D family, member 5 [Homo sapiens] | gi\|55960908 |
| phospholipase D family, member 5 [Homo sapiens] | gi\|55665367 |
| phospholipase D family, member 5 [Homo sapiens] | gi\|55959384 |
| phospholipase D family, member 5, isoform | gi\|119590518 |
| CRA_a [Homo sapiens] | |
| phospholipase D family, member 5, isoform | gi\|119590517 |
| CRA_a [Homo sapiens] | |
| phospholipase D family, member 5, isoform | gi\|119590519 |
| CRA_b [Homo sapiens] | |
| unnamed protein product [Homo sapiens] | gi\|221040766 |
| unnamed protein product [Homo sapiens] | gi\|21758029 |
| unnamed protein product [Homo sapiens] | gi\|21750120 |

[0063] Peptide Information

| Calc. | Obsrv. | | | Start | End | |
|---|---|---|---|---|---|---|
| Mass | Mass | ±da | ±ppm | Seq. | Seq. | Sequence |
| 865.3898 | 865.416 | .0262 | 30 | 523 | 531 | TATDDTGGK |

| | |
|---|---|
| RecName: Full = Zinc finger | gi\|145559547 |
| protein 493 | |

[0064] Protein Group

| | |
|---|---|
| LDL induced EC protein [Homo sapiens] | gi\|5924319 |
| LDL induced endothelial cell protein | gi\|8518179 |
| [Homo sapiens] | |
| RecName: Full = Zinc finger protein 580; | gi\|55976777 |
| AltName: Full = LDL-induced EC | |
| protein | |
| ZNF493 protein [Homo sapiens] | gi\|85726510 |
| Zinc finger protein 580 [Homo sapiens] | gi\|17389292 |
| similar to hypothetical protein FLJ13659, | gi\|119605302 |
| isoform CRA_a [Homo sapiens] | |
| similar to hypothetical protein FLJ13659, | gi\|119605305 |
| isoform CRA_d [Homo sapiens] | |
| unnamed protein product [Homo sapiens] | gi\|189054604 |
| unnamed protein product [Homo sapiens] | gi\|21754914 |
| unnamed protein product [Homo sapiens] | gi\|34534405 |
| unnamed protein product [Homo sapiens] | gi\|34535891 |
| zinc finger protein 493 isoform 1 [Homo sapiens] | gi\|115511042 |
| zinc finger protein 493 isoform 3 [Homo sapiens] | gi\|115511044 |
| zinc finger protein 493 variant [Homo sapiens] | gi\|62087752 |
| zinc finger protein 580 [Homo sapiens] | gi\|7705881 |
| zinc finger protein 580 [Homo sapiens] | gi\|119592805 |
| zinc finger protein 580 [Homo sapiens] | gi\|254540128 |
| zinc finger protein 580 [Homo sapiens] | gi\|46361970 |

[0065] Peptide Information

| | Obsrv. | | | Start | End | |
|---|---|---|---|---|---|---|
| Calc. Mass | Mass | ±da | ±ppm | Seq. | Seq. | Sequence |
| 842.4591 | 842.4064 | −.0527 | −63 | 624 | 630 | RSSHLSR |
| | 842.4064 | | | | | |

| | |
|---|---|
| hCG2015903 [Homo sapiens] | gi\|119616226 |

[0066] Peptide Information

| | Obsrv. | | | Start | End | |
|---|---|---|---|---|---|---|
| Calc. Mass | Mass | ±da | ±ppm | Seq. | Seq. | Sequence |
| 842.4591 | 842.4064 | −.0527 | −63 | 44 | 50 | RSHSVTR |

RecName: Full = Klotho; Contains: RecName:
Full = Klotho peptide; Flags: Precursor

[0067] Protein Group

| | |
|---|---|
| | gi\|77416517 |
| 179I15.1 (klotho) [Homo sapiens] | gi\|16116628 |
| Klotho protein (KL) [Homo sapiens] | gi\|2924562 |
| Klotho protein (KL) [Homo sapiens] | gi\|2924561 |
| klotho [Homo sapiens] | gi\|55663139 |
| klotho [Homo sapiens] | gi\|2618596 |
| klotho precursor [Homo sapiens] | gi\|24497614 |
| klotho, isoform CRA_a [Homo sapiens] | gi\|119628930 |
| klotho, isoform CRA_b [Homo sapiens] | gi\|119628931 |
| unnamed protein product [Homo sapiens] | gi\|209985373 |
| unnamed protein product [Homo sapiens] | gi\|209985371 |

[0068] Peptide Information

| | Obsrv. | | | Start | End | |
|---|---|---|---|---|---|---|
| Calc. Mass | Mass | ±da | ±ppm | Seq. | Seq. | Sequence |
| 842.4189 | 842.4064 | −.0125 | −15 | 1 | 8 | MPASAPPR |

| | |
|---|---|
| unnamed protein product [Homo sapiens] | gi\|40039486 |

[0069] Peptide Information

| Calc. | | | | Star | End | |
|---|---|---|---|---|---|---|
| Mass | Obsrv. | ±da | ±ppm | Seq. | Seq. | Sequence |
| 1103.515 | 1103.4888 | −.0262 | −24 | 58 | 68 | IPGSPXESMGR |

| | |
|---|---|
| Chain A, Crystal Structure Of The Small | gi\|1193890 |
| (Gemdndcam) In Complex To Mg.Gdp | |

[0070] Protein Group

| | |
|---|---|
| Chain B, Crystal Structure Of The Small | gi\|1193890 |
| (Gemdndcam) In Complex To Mg.Gdp | |

[0071] Peptide Information

| | Obsrv. | | | | | |
|---|---|---|---|---|---|---|
| Calc. Mass | Mass | ±da | ±ppm | Star | End | Sequence |
| 1149.5681 | 1149.517 | −.0511 | −44 | 12 | 138 | XREVSVSEGR |

| | |
|---|---|
| coiled-coil domain-containing protein | gi\|2245932 |
| 60 | |

[0072] Protein Group

| | |
|---|---|
| Coiled-coil domain containing 60 [Homo | gi\|2625179 |
| RecName: Full = Coiled-coil domain-containing | gi\|296434427 |
| protein | |
| 60 | |
| coiled-coil domain containing 60, isoform | gi\|119618556 |
| CRA_d [Homo sapiens] | |

[0073] Peptide Information

| Calc. | Obsrv. | | | Start | End | |
|---|---|---|---|---|---|---|
| Mass | Mass | ±da | ±ppm | Seq. | Seq. | Sequence |
| 1103.599 | 1103.4888 | −.1102 | −100 | 222 | 230 | IPTMRVTNR |

| | |
|---|---|
| unnamed protein product [Homo sapiens] | gi\|21749960 |

[0074] Peptide Information

| Calc. | Obsrv. | | | Start | End | |
|---|---|---|---|---|---|---|
| Mass | Mass | ±da | ±ppm | Seq. | Seq. | Sequence |
| 1103.4747 | 1103.4888 | .0141 | 13 | 646 | 654 | MMEASLY |
| | | | | | | DK |

| | | | |
|---|---|---|---|
| | 24/A24 | | Instr./Gel |
| | | | Origin |
| | [1] Sample Project | | Instrument |
| | 20110503 | | Sample |
| | | | Name |
| Protein Name- | KH2 (SEQ ID NO. KH2) | Accession No. | |

| | |
|---|---|
| keratin, type II cytoskeletal 2 | gi\|47132620 |
| epidermal [Homo sapiens] | |
| Protein Group | |
| Keratin 2 [Homo sapiens] | gi\|68563400 |
| Keratin 2 [Homo sapiens] | gi\|68563334 |
| Keratin 2 [Homo sapiens] | |
| Keratin 2 [Homo sapiens] | gi\|64654451 |

RecName: Full = Keratin, type II
cytoskeletal 2
epidermal; AltName: Full = Cytokeratin-2e; Short = CK-2e;
AltName: Full = Epithelial keratin-2e; AltName:
Full = Keratin-2 epidermis; AltName: Full = Keratin-2e;

| | |
|---|---|
| Short = K2e; AltName: Full = | gi\|239938650 |
| Type-II keratin Kb2 | |
| keratin 2A (epidermal ichthyosis bullosa | gi\|119617047 |
| of Siemens) [Homo sapiens] | |

[0075] Peptide Information

| | Obsrv. | | | Start | End | |
|---|---|---|---|---|---|---|
| Calc. Mass | Mass | ±da | ±ppm | Seq. | Seq. | Sequence |
| 831.4935 | 831.4731 | −.0204 | −25 | 62 | 70 | SLVGLGGTK |
| 996.5221 | 996.6213 | .0992 | 100 | 431 | 439 | GEHALKDAR |
| 1001.5374 | 1001.5252 | −.0122 | −12 | 176 | 183 | AQEREQIK |
| 1107.543 | 1107.5515 | .0085 | 8 | 354 | 362 | AQYEEIAQR |
| 1254.6074 | 1254.649 | .0416 | 33 | 21 | 34 | GFSSGSAVVSGGSR |
| 1272.5493 | 1272.5642 | .0149 | 12 | 1 | 10 | MSCQISCKSR |
| 1320.5829 | 1320.6151 | .0322 | 24 | 46 | 61 | HGGGGGGFGGGG |
| | | | | | | FGSR |
| 1320.5829 | 1320.6151 | .0322 | 24 | 46 | 61 | HGGGGGGFGGGG |
| | | | | | | FGSR |
| 1740.7057 | 1740.7317 | .026 | 15 | 525 | 544 | GSSSGGGYSSGSS |
| | | | | | | SYGS |
| | | | | | | GGR |
| 1741.7485 | 1741.7495 | .001 | 1 | 550 | 572 | GGSGGGGSISGGG |
| | | | | | | YGS |
| | | | | | | GGGSGGR |
| 1752.8837 | 1752.7648 | −.1189 | −68 | 288 | 302 | DVDNAYMIKVELQSK |
| 1838.9144 | 1838.9127 | −.0017 | −1 | 71 | 92 | SISISVAGGGGGFG |
| | | | | | | AAG |
| | | | | | | GFGGR |

| | |
|---|---|
| keratin 2e [Homo sapiens] | gi\|2565257 |

[0076] Protein Group

| | |
|---|---|
| epidermal cytokeratin 2 [Homo sapiens] | gi\|181402 |

[0077] Peptide Information

| | | | | Start | End | |
|---|---|---|---|---|---|---|
| Calc. Mass | Obsrv. Mass | ±da | ±ppm | Seq. | Seq. | Sequence |
| 831.4935 | 831.4731 | −.0204 | −25 | 62 | 70 | SLVGLGGTK |
| 996.5221 | 996.6213 | .0992 | 100 | 437 | 445 | GEHALKDAR |
| 1001.5374 | 1001.5252 | −.0122 | −12 | 182 | 189 | AQEREQIK |
| 1107.543 | 1107.5515 | .0085 | 8 | 360 | 368 | AQYEEIAQR |
| 1254.6074 | 1254.649 | .0416 | 33 | 21 | 34 | GFSSGSAVVSGGSR |
| 1272.5493 | 1272.5642 | .0149 | 12 | 1 | 10 | MSCQISCKSR |
| 1320.5829 | 1320.6151 | .0322 | 24 | 46 | 61 | HGGGGGGFGG |
| | | | | | | GGFGSR |
| 1320.5829 | 1320.6151 | .0322 | 24 | 46 | 61 | HGGGGGGFGG |
| | | | | | | GGFGSR |
| 1740.7057 | 1740.7317 | .026 | 15 | 531 | 550 | GSSSGGGYSSG |
| | | | | | | SSSYGS |
| | | | | | | GGR |
| 1741.7485 | 1741.7495 | .001 | 1 | 556 | 578 | GGSGGGGSISG |
| | | | | | | GGYGS |
| | | | | | | GGGSGGR |
| 1752.8837 | 1752.7648 | −.1189 | −68 | 294 | 308 | DVDNAYMIKVEL |
| | | | | | | QSK |
| 1838.9144 | 1838.9127 | −.0017 | −1 | 71 | 92 | SISISVAGGGGG |
| | | | | | | FGAAG |
| | | | | | | GFGGR |

| | |
|---|---|
| unnamed protein product [Homo sapiens] | gi\|215415640 |

[0078] Peptide Information

| Calc. | Obsrv. | | | Start | End | |
|---|---|---|---|---|---|---|
| Mass | Mass | ±da | ±ppm | Seq. | Seq. | Sequence |
| 831.4359 | 831.4731 | .0372 | 45 | 189 | 195 | LAEYHAK |
| 1012.5786 | 1012.5838 | .0052 | 5 | 207 | 215 | AKPALEDL |
| | | | | | | R |
| 1226.5437 | 1226.5537 | .01 | 8 | 1 | 10 | DEPPQSPW |
| | | | | | | DR |
| 1226.5437 | 1226.5537 | .01 | 8 | 1 | 10 | DEPPQSPW |
| | | | | | | DR |
| 1301.6484 | 1301.6486 | .0002 | 0 | 161 | 171 | THLAPYSD |
| | | | | | | ELR |
| 1301.6484 | 1301.6486 | .0002 | 0 | 161 | 171 | THLAPYSD |
| | | | | | | ELR |

| | |
|---|---|
| Chain A, Solution Structure Of Double | gi\|293651900 |
| Super Helix Model | |

[0079] Protein Group

| | |
|---|---|
| Chain A, Crystal Structure Of Lipid-Free Human | gi\|90108664 |
| Apolipoprotein A-I | |
| Chain B, Crystal Structure Of Lipid-Free Human | gi\|90108665 |
| Apolipoprotein A-I | |
| Chain B, Solution Structure Of Double Super Helix | gi\|293651901 |
| Model | |
| Chain C, Crystal Structure Of Lipid-Free Human | gi\|90108666 |
| Apolipoprotein A-I | |
| apoA1 [Homo sapiens] | gi\|490098 |
| apoAI [Homo sapiens] | gi\|1330306 |
| unnamed protein product [Homo sapiens] | gi\|215415678 |
| unnamed protein product [Homo sapiens] | gi\|215415656 |
| unnamed protein product [Homo sapiens] | |
| unnamed protein product [Homo sapiens] | gi\|215415652 |
| unnamed protein product [Homo sapiens] | gi\|215415650 |
| unnamed protein product [Homo sapiens] | gi\|215415648 |
| unnamed protein product [Homo sapiens] | gi\|215415644 |
| unnamed protein product [Homo sapiens] | gi\|215415638 |
| unnamed protein product [Homo sapiens] | gi\|215415636 |
| unnamed protein product [Homo sapiens] | gi\|215415626 |
| unnamed protein product [Homo sapiens] | gi\|215415624 |

[0080] Peptide Information

| Calc. | Obsrv. | | | Start | End | |
|---|---|---|---|---|---|---|
| Mass | Mass | ±da | ±ppm | Seq. | Seq. | Sequence |
| 831.4359 | 831.4731 | .0372 | 45 | 189 | 195 | LAEYHAK |
| 1012.5786 | 1012.5838 | .0052 | 5 | 207 | 215 | AKPALEDL |
| | | | | | | R |
| 1226.5437 | 1226.5537 | .01 | 8 | 1 | 10 | DEPPQSPW |
| | | | | | | DR |
| 1226.5437 | 1226.5537 | .01 | 8 | 1 | 10 | DEPPQSPW |
| | | | | | | DR |
| 1301.6484 | 1301.6486 | .0002 | 0 | 161 | 171 | THLAPYSD |
| | | | | | | ELR |
| 1301.6484 | 1301.6486 | .0002 | 0 | 161 | 171 | THLAPYSD |
| | | | | | | ELR |

| | |
|---|---|
| lipoprotein Gln I | gi\|229479 |

[0081] Protein Group

| | |
|---|---|
| protein, lipid binding AI | gi\|229513 |

[0082] Peptide Information

| Calc. | Obsrv. | | | Start | End | |
|---|---|---|---|---|---|---|
| Mass | Mass | ±da | ±ppm | Seq. | Seq. | Sequence |
| 831.4359 | 831.4731 | .0372 | 45 | 192 | 198 | LAEYHAK |
| 1012.5786 | 1012.5838 | .0052 | 5 | 210 | 218 | AKPALEDL |
| | | | | | | R |
| 1226.5437 | 1226.5537 | .01 | 8 | 1 | 10 | DEPPQSP |
| | | | | | | WDR |
| 1226.5437 | 1226.5537 | .01 | 8 | 1 | 10 | DEPPQSP |
| | | | | | | WDR |
| 1301.6484 | 1301.6486 | .0002 | 0 | 164 | 174 | THLAPYS |
| | | | | | | DELR |
| 1301.6484 | 1301.6486 | .0002 | 0 | 164 | 174 | THLAPYS |
| | | | | | | DELR |

| | |
|---|---|
| chromodomain helicase DNA binding | gi\|119603201 |
| protein 9, isoform | |
| CRA_c [Homo sapiens] | |

[0083] Peptide Information

| | Obsrv. | | | Start | | |
|---|---|---|---|---|---|---|
| Calc. Mass | Mass | ±da | ±ppm | Seq. | End Seq. | Sequence |
| 800.4876 | 800.43 | −.0576 | −72 | 1437 | 1444 | DLLIGAAK |
| 802.457 | 802.4542 | −.0028 | −3 | 1067 | 1072 | AEWLRK |
| 806.4254 | 806.4277 | .0023 | 3 | 42 | 48 | KVESESK |
| 807.3843 | 807.409 | .0247 | 31 | 2283 | 2290 | NSDLGSSK |
| 854.5458 | 854.5139 | −.0319 | −37 | 2069 | 2076 | ILTGPVVR |
| 856.4999 | 856.5127 | .0128 | 15 | 9 | 16 | GRPPSSKK |
| 887.4832 | 887.4777 | −.0055 | −6 | 819 | 825 | EIEDLLR |
| 903.4828 | 903.4889 | .0061 | 7 | 1729 | 1735 | DRVMINR |
| 917.4839 | 917.4818 | −.0021 | −2 | 1450 | 1456 | TDYHILR |
| 932.5121 | 932.4993 | −.0128 | −14 | 1507 | 1514 | GIILEEMK |
| 932.5121 | 932.4993 | −.0128 | −14 | 1507 | 1514 | GIILEEMK |
| 948.4931 | 948.4807 | −.0124 | −13 | 797 | 805 | AVLQSMSGR |
| 960.5407 | 960.5235 | −.0172 | −18 | 1 | 8 | MSSVKRPR |
| 1012.5105 | 1012.5838 | .0733 | 72 | 760 | 767 | CHRIGQNK |
| 1107.5542 | 1107.5515 | −.0027 | −2 | 321 | 329 | DYKNGNQLR |
| 1185.6949 | 1185.6342 | −.0607 | −51 | 52 | 62 | ANRIISEAIAK |
| 1191.5826 | 1191.6141 | .0315 | 26 | 1168 | 1177 | ADPALCFLER |
| 1198.7042 | 1198.6854 | −.0188 | −16 | 1539 | 1549 | TLIKSEPVSPK |
| 1301.7059 | 1301.6486 | −.0573 | −44 | 897 | 908 | KAEIDIEAISGR |
| 1301.7059 | 1301.6486 | −.0573 | −44 | 897 | 908 | KAEIDIEAISGR |
| 1320.6287 | 1320.6151 | −.0136 | −10 | 348 | 359 | NCILADEMGLGK |
| 1320.6287 | 1320.6151 | −.0136 | −10 | 348 | 359 | NCILADEMGLGK |
| 1332.6552 | 1332.6293 | −.0259 | −19 | 610 | 619 | KCCNHPYLIK |
| 1332.6552 | 1332.6293 | −.0259 | −19 | 610 | 619 | KCCNHPYLIK |
| 1741.7698 | 1741.7495 | −.0203 | −12 | 826 | 841 | RGAYGAIMEEE |
| | | | | | | DEGSK |
| 1803.8177 | 1803.739 | −.0787 | −44 | 1793 | 1808 | EEHDQSTQMSK |
| | | | | | | EGGLK |
| 1803.8177 | 1803.739 | −.0787 | −44 | 1793 | 1808 | EEHDQSTQMSK |
| | | | | | | EGGLK |
| 1838.9218 | 1838.9127 | −.0091 | −5 | 1163 | 1177 | YNTIRADPALCF |
| | | | | | | LER |
| 2396.1133 | 2395.948 | −.1653 | −69 | 1522 | 1542 | EEPQSSEEESM |
| | | | | | | SSVETR TLIK |

| | |
|---|---|
| mitotic kinesin-related protein [Homo sapiens] | gi\|15919888 |

[0084] Peptide Information

| | Obsrv. | | | Start | End | |
|---|---|---|---|---|---|---|
| Calc. Mass | Mass | ±da | ±ppm | Seq. | Seq. | Sequence |
| 832.4563 | 832.4887 | .0324 | 39 | 1461 | 1466 | KWLEEK |
| 895.493 | 895.4698 | −.0232 | −26 | 191 | 197 | MNLKPHR |
| 917.4839 | 917.4818 | −.0021 | −2 | 336 | 343 | HQSVAFTK |
| 932.52 | 932.4993 | −.0207 | −22 | 351 | 358 | SHSIFTIK |
| 932.52 | 932.4993 | −.0207 | −22 | 351 | 358 | SHSIFTIK |
| 933.5363 | 933.4963 | −.04 | −43 | 1552 | 1559 | RIISETSK |
| 948.5149 | 948.4807 | −.0342 | −36 | 118 | 126 | VFGPATTQK |
| 960.4996 | 960.5235 | .0239 | 25 | 903 | 910 | EEKAELNK |
| 982.4363 | 982.4796 | .0433 | 44 | 1282 | 1289 | EEDYADLK |
| 988.5058 | 988.5498 | .044 | 45 | 1571 | 1579 | RISSADPDK |
| 1033.5347 | 1033.5291 | −.0056 | −5 | 1371 | 1378 | EKIIEDMR |
| 1199.7246 | 1199.6718 | −.0528 | −44 | 576 | 585 | LLDLIEDLKK |
| 1229.71 | 1229.8047 | .0947 | 77 | 1116 | 1125 | EKETLIQQLK |
| 1258.6385 | 1258.5676 | −.0709 | −56 | 629 | 638 | EILEENAERR |
| 1301.677 | 1301.6486 | −.0284 | −22 | 811 | 821 | LICNETVEVPK |
| 1301.677 | 1301.6486 | −.0284 | −22 | 811 | 821 | LICNETVEVPK |
| 1315.729 | 1315.6655 | −.0635 | −48 | 1560 | 1570 | IETQIMDIKPK |
| 1320.6464 | 1320.6151 | −.0313 | −24 | 359 | 369 | ILQIEDSEMSR |
| 1320.6464 | 1320.6151 | −.0313 | −24 | 359 | 369 | ILQIEDSEMSR |
| 1487.8251 | 1487.7683 | −.0568 | −38 | 1560 | 1571 | IETQIMDIKPKR |
| 1505.7992 | 1505.7354 | −.0638 | −42 | 961 | 973 | IMKLSNEIETATR |
| 1505.7992 | 1505.7354 | −.0638 | −42 | 961 | 973 | IMKLSNEIETATR |
| 1740.7415 | 1740.7317 | −.0098 | −6 | 1658 | 1671 | SNEMEEDLVKCENK |
| 1741.9232 | 1741.7495 | −.1737 | −100 | 143 | 158 | GQSRLIFTYGLTNS |
| | | | | | | GK |
| 1838.9283 | 1838.9127 | −.0156 | −8 | 159 | 174 | TYTFQGTEENI |
| | | | | | | GILPR |

| | |
|---|---|
| unnamed protein product [Homo sapiens] | gi\|215415654 |

[0085] Protein Group

| | |
|---|---|
| unnamed protein product [Homo sapiens] | gi\|215415646 |
| unnamed protein product [Homo sapiens] | gi\|215415632 |
| unnamed protein product [Homo sapiens] | gi\|215415630 |
| unnamed protein product [Homo sapiens] | gi\|215415628 |
| unnamed protein product [Homo sapiens] | gi\|215415658 |

[0086] Peptide Information

| Calc. | Obsrv. | | | Start | End | |
|---|---|---|---|---|---|---|
| Mass | Mass | ±da | ±ppm | Seq. | Seq. | Sequence |
| 831.4359 | 831.4731 | .0372 | 45 | 189 | 195 | LAEYHAK |
| 1226.5437 | 1226.5537 | .01 | 8 | 1 | 10 | DEPPQSPW |
| | | | | | | DR |
| 1226.5437 | 1226.5537 | .01 | 8 | 1 | 10 | DEPPQSPW |
| | | | | | | DR |
| 1301.6484 | 1301.6486 | .0002 | 0 | 161 | 171 | THLAPYSD |
| | | | | | | ELR |
| 1301.6484 | 1301.6486 | .0002 | 0 | 161 | 171 | THLAPYSD |
| | | | | | | ELR |

| | |
|---|---|
| ciprofibrate bound protein p240 isoform | gi\|68164076 |
| PRIC320-2 [Homo sapiens] | |

[0087] Peptide Information

| | | | | Start | | |
|---|---|---|---|---|---|---|
| Calc. Mass | Obsrv. Mass | ±da | ±ppm | Seq. | End Seq. | Sequence |
| 800.4876 | 800.43 | −.0576 | −72 | 1083 | 1090 | DLLIGAAK |
| 802.457 | 802.4542 | −.0028 | −3 | 713 | 718 | AEWLRK |
| 807.3843 | 807.409 | .0247 | 31 | 1929 | 1936 | NSDLGSSK |
| 854.5458 | 854.5139 | −.0319 | −37 | 1715 | 1722 | ILTGPVVR |
| 856.5363 | 856.5127 | −.0236 | −28 | 1731 | 1738 | RPKSGIAK |
| 887.4832 | 887.4777 | −.0055 | −6 | 465 | 471 | EIEDLLR |
| 903.4828 | 903.4889 | .0061 | 7 | 1375 | 1381 | DRVMINR |
| 917.4839 | 917.4818 | −.0021 | −2 | 1096 | 1102 | TDYHILR |
| 932.5121 | 932.4993 | −.0128 | −14 | 1153 | 1160 | GIILEEMK |
| 932.5121 | 932.4993 | −.0128 | −14 | 1153 | 1160 | GIILEEMK |
| 948.4931 | 948.4807 | −.0124 | −13 | 443 | 451 | AVLQSMSGR |
| 1012.5105 | 1012.5838 | .0733 | 72 | 406 | 413 | CHRIGQNK |
| 1191.5826 | 1191.6141 | .0315 | 26 | 814 | 823 | ADPALCFL |
| | | | | | | ER |
| 1198.7042 | 1198.6854 | −.0188 | −16 | 1185 | 1195 | TLIKSEPV |
| | | | | | | SPK |
| 1301.7059 | 1301.6486 | −.0573 | −44 | 543 | 554 | KAEIDIEAI |
| | | | | | | SGR |
| 1301.7059 | 1301.6486 | −.0573 | −44 | 543 | 554 | KAEIDIEAISGR |
| 1332.6552 | 1332.6293 | −.0259 | −19 | 256 | 265 | KCCNHPYLIK |
| 1332.6552 | 1332.6293 | −.0259 | −19 | 256 | 265 | KCCNHPYLIK |
| 1357.8058 | 1357.717 | −.0888 | −65 | 184 | 194 | LQVILKPMMLR |
| 1741.7698 | 1741.7495 | −.0203 | −12 | 472 | 487 | RGAYGAIMEEE |
| | | | | | | DEGSK |
| 1803.8177 | 1803.739 | −.0787 | −44 | 1439 | 1454 | EEHDQSTQMSK |
| | | | | | | EGGLK |
| 1803.8177 | 1803.739 | −.0787 | −44 | 1439 | 1454 | EEHDQSTQMSK |
| | | | | | | EGGLK |
| 1838.9218 | 1838.9127 | −.0091 | −5 | 809 | 823 | YNTIRADPALCF |
| | | | | | | LER |
| 2396.1133 | 2395.948 | −.1653 | −69 | 1168 | 1188 | EEPQSSEEESM |
| | | | | | | SSVETR TLIK |

parvalbumin [Homo sapiens]

[0088] Protein Group

| | |
|---|---|
| parvalbumin [Homo sapiens] | gi\|169158851 |
| | gi\|220897517 |

[0089] Peptide Information

| | Obsrv. | | | Start | End | |
|---|---|---|---|---|---|---|
| Calc. Mass | Mass | ±da | ±ppm | Seq. | Seq. | Sequence |
| 852.3953 | 852.4766 | .0813 | 95 | 83 | 90 | MLMAAGDK |
| 891.4781 | 891.4754 | −.0027 | −3 | 75 | 82 | DLSAKETK |
| 905.455 | 905.4752 | .0202 | 22 | 45 | 51 | VFHMLDK |
| 1033.5499 | 1033.5291 | −.0208 | −20 | 44 | 51 | KVFHMLDK |
| 1226.5756 | 1226.5537 | −.0219 | −18 | 80 | 90 | ETKMLMAAGDK |
| 1226.5756 | 1226.5537 | −.0219 | −18 | 80 | 90 | ETKMLMAAGDK |
| 1262.6296 | 1262.63 | .0004 | 0 | 1 | 11 | MTDLLNAEDIK |
| 1487.6497 | 1487.7683 | .1186 | 80 | 91 | 105 | DGDGKIGVDDPAD |
| | | | | | | VD |

| | |
|---|---|
| SH2/SH3 adaptor protein NCK-beta [Homo sapiens] | gi\|2921587 |

[0090] Peptide Information

| | | | | Start | End | |
|---|---|---|---|---|---|---|
| Calc. Mass | Obsrv. Mass | ±da | ±ppm | Seq. | Seq. | Sequence |
| 800.4485 | 800.43 | −.0185 | −23 | 42 | 48 | VRNAANR |
| 903.4948 | 903.4889 | −.0059 | −7 | 38 | 43 | TWWRVR |
| 932.4935 | 932.4993 | .0058 | 6 | 128 | 135 | EDELSLVK |
| 932.4935 | 932.4993 | .0058 | 6 | 128 | 135 | EDELSLVK |
| 960.5472 | 960.5235 | −.0237 | −25 | 74 | 82 | DTLGLGKTR |
| 1001.5877 | 1001.5252 | −.0625 | −62 | 2 | 10 | TEEVIVIAK |
| 1033.5022 | 1033.5291 | .0269 | 26 | 186 | 196 | GASLSNGQGSR |
| 1226.5695 | 1226.5537 | −.0158 | −13 | 294 | 303 | HQAQCALNER |
| 1226.5695 | 1226.5537 | −.0158 | −13 | 294 | 303 | HQAQCALNER |
| 1487.7853 | 1487.7683 | −.017 | −11 | 26 | 37 | VNERLWLLDDSK |
| 1719.896 | 1719.7832 | −.1128 | −66 | 336 | 349 | VQLVDNVYCIGQRR |
| 1752.8076 | 1752.7648 | −.0428 | −24 | 11 | 24 | WDYTAQQDQELDIK |

| | |
|---|---|
| Chain A, The Helix-Hinge-Helix | gi\|157831262 |
| Structural Motif In | |
| Human Apolipoprotein A-I Determined | |
| By Nmr Spectroscopy, 1 Structure | |

[0091] Protein Group

| | Obsrv. | | | Start | End | |
|---|---|---|---|---|---|---|
| Calc. Mass | Mass | ±da | ±ppm | Seq. | Seq. | Sequence |
| 1001.5261 | 1001.5252 | −.0009 | −1 | 37 | 46 | LEALKENGGA |
| 1301.6484 | 1301.6486 | .0002 | 0 | 20 | 30 | THLAPYSDELR |
| 1301.6484 | 1301.6486 | .0002 | 0 | 20 | 30 | THLAPYSDELR |

| | |
|---|---|
| RecName: Full = Protein FAM74A4 | gi\|74754292 |

[0092] Peptide Information

| | |
|---|---|
| Chain A, The Helix-Hinge-Helix | gi\|157831263 |
| Structural Motif In | |
| Human Apolipoprotein A-I Determined | |
| By Nmr | |
| Spectroscopy, 1 Structure | |

[0093] Peptide Information

| | Obsrv. | | | Start | End | |
|---|---|---|---|---|---|---|
| Calc. Mass | Mass | ±da | ±ppm | Seq. | Seq. | Sequence |
| 800.4009 | 800.43 | .0291 | 36 | 93 | 99 | RHGESSK |
| 831.4835 | 831.4731 | −.0104 | −13 | 71 | 76 | TWKQLR |
| 832.4675 | 832.4887 | .0212 | 25 | 57 | 62 | TWKELR |
| 903.4418 | 903.4889 | .0471 | 52 | 63 | 70 | NSETVPEK |
| 1104.5103 | 1104.5414 | .0311 | 28 | 77 | 85 | GCLQEDVQR |
| 1246.5481 | 1246.671 | .1229 | 99 | 7 | 18 | GCPGGDVETAQR |
| 1301.6696 | 1301.6486 | −.021 | −16 | 60 | 70 | ELRNSETVPEK |
| 1301.6696 | 1301.6486 | −.021 | −16 | 60 | 70 | ELRNSETVPEK |
| 1487.7384 | 1487.7683 | .0299 | 20 | 77 | 88 | GCLQEDVQRVQR |

| | |
|---|---|
| apolipoprotein A-1 A175P variant [Homo sapiens] | gi\|19569153 |

[0094] Peptide Information

| | Obsrv. | | | Start | End | |
|---|---|---|---|---|---|---|
| Calc. Mass | Mass | ±da | ±ppm | Seq. | Seq. | Sequence |
| 831.4359 | 831.4731 | .0372 | 45 | 35 | 41 | LAEYHAK |
| 1301.6484 | 1301.6486 | .0002 | 0 | 7 | 17 | THLAPYSDELR |
| 1301.6484 | 1301.6486 | .0002 | 0 | 7 | 17 | THLAPYSDELR |

| | |
|---|---|
| novel protein [Homo sapiens] | gi\|57209555 |

[0095] Peptide Information

| | Obsrv. | | | Start | End | |
|---|---|---|---|---|---|---|
| Calc. Mass | Mass | ±da | ±ppm | Seq. | Seq. | Sequence |
| 807.4471 | 807.409 | −.0381 | −47 | 90 | 96 | DLGLHPR |
| 887.5057 | 887.4777 | −.028 | −32 | 57 | 64 | ARGLDLSR |
| 903.4894 | 903.4889 | −.0005 | −1 | 139 | 146 | SVGEDKIR |
| 1246.675 | 1246.671 | −.004 | −3 | 47 | 58 | GLGSQTESLKAR |
| 1315.6787 | 1315.6655 | −.0132 | −10 | 67 | 77 | TCVVVAEERPR |
| 1740.7278 | 1740.7317 | .0039 | 2 | 33 | 46 | DTFCSYSVMELCTK |

| | |
|---|---|
| unnamed protein product [Homo sapiens] | gi\|7020094 |

[0096] Peptide Information

| Calc. Mass | Obsrv. | ±da | ±ppm | Start | End | Sequence |
|---|---|---|---|---|---|---|
| 814.4345 | 814.4791 | .0446 | 55 | 13 | 13 | YIEVYK |
| 832.4457 | 832.4887 | .043 | 52 | 28 | 29 | DCIRLR |
| 903.4319 | 903.4889 | .057 | 63 | 11 | 11 | FVSEEHR |
| 996.5625 | 996.6213 | .0588 | 59 | 23 | 24 | RYIELFR |
| 1191.5762 | 1191.614 | .0379 | 32 | 34 | 35 | AFMAAQKCHK |
| 1254.6113 | 1254.649 | .0377 | 30 | 4 | 49 | FSDPERVNYK |
| 1315.6965 | 1315.665 | −.031 | −24 | 24 | 25 | STAAEVQQVLNR |
| 1320.6465 | 1320.615 | −.0314 | −24 | 5 | 68 | MELIDDNTVVR |
| 1320.6465 | 1320.615 | −.0314 | −24 | 5 | 68 | MELIDDNTVVR |
| 1646.8021 | 1646.841 | .0397 | 24 | 2 | 15 | TEYLNFEKSSSVS |

parvalbumin [Homo sapiens]

[0097] Protein Group

| | |
|---|---|
| parvalbumin [Homo sapiens] | gi\|169158850 |
| | gi\|220897515 |

[0098] Peptide Information

| | Obsrv. | | | Start | End | |
|---|---|---|---|---|---|---|
| Calc. Mass | Mass | ±da | ±ppm | Seq. | Seq. | Sequence |
| 852.3953 | 852.4766 | .0813 | 95 | 53 | 60 | MLMAAGDK |
| 891.4781 | 891.4754 | −.0027 | −3 | 45 | 52 | DLSAKETK |
| 905.455 | 905.4752 | .0202 | 22 | 15 | 21 | VFHMLDK |
| 1033.5499 | 1033.5291 | −.0208 | −20 | 14 | 21 | KVFHMLDK |
| 1226.5756 | 1226.5537 | −.0219 | −18 | 50 | 60 | ETKMLMAAGDK |
| 1226.5756 | 1226.5537 | −.0219 | −18 | 50 | 60 | ETKMLMAAGDK |
| 1838.8655 | 1838.9127 | .0472 | 26 | 61 | 78 | DGDGKIGVDEFSTL |
| | | | | | | VAES |

| | |
|---|---|
| prefoldin subunit 6 [Homo sapiens] | gi\|123270303 |

[0099] Protein Group

| | |
|---|---|
| prefoldin subunit 6 [Homo sapiens] | gi\|168985736 |

[0100] Peptide Information

| | | | | Start | End | |
|---|---|---|---|---|---|---|
| Calc. Mass | Obsrv. Mass | ±da | ±ppm | Seq. | Seq. | Sequence |
| 802.4305 | 802.4542 | .0237 | 30 | 9 | 15 | LQGEVEK |
| 807.4359 | 807.409 | −.0269 | −33 | 16 | 21 | YQQLQK |
| 809.3934 | 809.3939 | .0005 | 1 | 26 | 32 | SMSGRQK |
| 832.4597 | 832.4887 | .029 | 35 | 1 | 7 | MAELIQK |
| 960.5546 | 960.5235 | −.0311 | −32 | 1 | 8 | MAELIQKK |
| 1258.675 | 1258.5676 | −.1074 | −85 | 67 | 78 | QELGEARATVGK |

| | |
|---|---|
| Chain A, Crystal Structure OfHuman | gi\|110590538 |
| Pyrroline-5-Carboxylate Synthetase | |

[0101] Protein Group

| | |
|---|---|
| Chain B, Crystal Structure Of | gi\|110590539 |
| Human | |
| Pyrroline-5-Carboxylate Synthetase | |

[0102] Peptide Information

| | Obsrv. | | | Start | End | |
|---|---|---|---|---|---|---|
| Calc. Mass | Mass | ±da | ±ppm | Seq. | Seq. | Sequence |
| 995.636 | 995.6278 | −.0082 | −8 | 219 | 226 | XIDLIIPR |

| | |
|---|---|
| ribosomal protein L39 variant | gi\|62087734 |
| [Homo sapiens] | |

[0103] Peptide Information

| | Obsrv. | | | Start | End | |
|---|---|---|---|---|---|---|
| Calc. Mass | Mass | ±da | ±ppm | Seq. | Seq. | Sequence |
| 995.5533 | 995.6278 | .0745 | 75 | 1 | 8 | RVPHFSPR |

### 2—Fraction III

[0104] The sequence of these 8 new found proteins and their function are being investigated.

| | | | |
|---|---|---|---|
| | 29/B2 | | Instr./Gel |
| | | | Origin |
| | [1] Sample Project | | Instrument |
| | 20110503 | | Sample |
| | | | Name |
| Protein Name- | KH3 (SEQ ID NO. KH3) | Accession No. | |

| | |
|---|---|
| unnamed protein product [Homo sapiens]- | gi\|40044478 |
| Peptide Information | |

| | Obsrv. | | | Start | End | |
|---|---|---|---|---|---|---|
| Calc. Mass | Mass | ±da | ±ppm | Seq. | Seq. | Sequence |
| 841.4124 | 841.3352 | −.0772 | −92 | 36 | 42 | GTEYLMK |
| 857.4073 | 857.3639 | −.0434 | −51 | 36 | 42 | GTEYLMK |
| 857.4073 | 857.3639 | −.0434 | −51 | 36 | 42 | GTEYLMK |
| 1017.5225 | 1017.4292 | −.0933 | −92 | 62 | 71 | GAQKTGGGWR |
| 1097.566 | 1097.4915 | −.0745 | −68 | 36 | 44 | GTEYLMK |
| | | | | | | QK |
| 1235.7107 | 1235.683 | −.0277 | −22 | 51 | 61 | GEELLLGV |
| | | | | | | HLR |

| | |
|---|---|
| voltage-dependent anion channel 3, isoform | gi\|119583621 |
| CRA_a [Homo sapiens] | |

[0105] Peptide Information

| Calc. Mass | Obsrv. Mass | ±da | ±ppm | Start Seq. | End Seq. | Sequence |
|---|---|---|---|---|---|---|
| 815.3604 | 815.3253 | −.0351 | −43 | 1 | 7 | MSFDTAK |
| 817.3951 | 817.3161 | −.079 | −97 | 113 | 120 | NFSAGGHK |
| 857.3644 | 857.3639 | −.0005 | −1 | 71 | 76 | YMLDCR |
| 857.3644 | 857.3639 | −.0005 | −1 | 71 | 76 | YMLDCR |
| 1014.4924 | 1014.4064 | −.086 | −85 | 1 | 9 | MSFDTAKSK |
| 1030.4874 | 1030.429 | −.0584 | −57 | 1 | 9 | MSFDTAKSK |

| | |
|---|---|
| cysteine-rich protein 2 variant [Homo sapiens] | gi\|62898063 |

[0106] Peptide Information

| Calc. | Obsrv. | | | Start | End | |
|---|---|---|---|---|---|---|
| Mass | Mass | ±da | ±ppm | Seq. | Seq. | Sequence |
| 807.3488 | 807.3163 | −.0325 | −40 | 5 | 10 | CPKCDK |
| 809.3392 | 809.3123 | −.0269 | −33 | 153 | 158 | CERCGK |
| 821.4008 | 821.3269 | −.0739 | −90 | 1 | 7 | MASKCPK |
| 837.3957 | 837.3484 | −.0473 | −56 | 1 | 7 | MASKCPK |
| 857.4403 | 857.3639 | −.0764 | −89 | 11 | 17 | TVYFAEK |
| 857.4403 | 857.3639 | −.0764 | −89 | 11 | 17 | TVYFAEK |
| 1012.4703 | 1012.4331 | −.0372 | −37 | 28 | 34 | FCLKCER |

| | |
|---|---|
| D53 [Homo sapiens] | gi\|1469924 |

[0107] Peptide Information

| Calc. | Obsrv. | | | Start | End | |
|---|---|---|---|---|---|---|
| Mass | Mass | ±da | ±ppm | Seq. | Seq. | Sequence |
| 807.3189 | 807.3163 | −.0026 | −3 | 55 | 60 | EEELQC |
| 825.3672 | 825.3186 | −.0486 | −59 | 1 | 6 | CSFQQR |
| 1036.4615 | 1036.4291 | −.0324 | −31 | 53 | 60 | TKEEELQC |

| | |
|---|---|
| cysteine-rich protein 2 [Homo sapiens] | gi\|4503049 |

[0108] Protein Group

| | |
|---|---|
| Cysteine-rich protein 2 [Homo sapiens] | gi\|12653331 |
| Cysteine-rich protein 2 [Homo sapiens] | gi\|21706672 |
| Cysteine-rich protein 2 [Homo sapiens] | gi\|118763570 |
| Cysteine-rich protein 2 [Homo sapiens] | gi\|12804957 |
| LIM domain protein ESP1/CRP1 | gi\|1587284 |
| LIM domain protein ESP1/CRP1 | |
| RecName: Full = Cysteine-rich protein 2; | gi\|1706133 |
| Short = CRP-2; AltName: Full = Protein ESP1 | |
| cystein-rich protein 2 [Homo sapiens] | gi\|1215803 |
| cysteine-rich protein 2 [Homo sapiens] | gi\|1399028 |
| cysteine-rich protein 2 [Homo sapiens] | gi\|54696684 |
| unnamed protein product [Homo sapiens] | gi\|189055126 |

[0109] Peptide Information

| Calc. | Obsrv. | | | Start | End | |
|---|---|---|---|---|---|---|
| Mass | Mass | ±da | ±ppm | Seq. | Seq. | Sequence |
| 807.3488 | 807.3163 | −.0325 | −40 | 5 | 10 | CPKCDK |
| 809.3392 | 809.3123 | −.0269 | −33 | 153 | 158 | CERCGK |
| 821.4008 | 821.3269 | −.0739 | −90 | 1 | 7 | MASKCPK |
| 837.3957 | 837.3484 | −.0473 | −56 | 1 | 7 | MASKCPK |
| 857.4403 | 857.3639 | −.0764 | −89 | 11 | 17 | TVYFAEK |
| 857.4403 | 857.3639 | −.0764 | −89 | 11 | 17 | TVYFAEK |
| 1012.4703 | 1012.4331 | −.0372 | −37 | 28 | 34 | FCLKCER |

| | |
|---|---|
| cysteine-rich protein 2 [Homo sapiens] | gi\|119602330 |

[0110] Peptide Information

| Calc. Mass | Obsrv. | ±da | ±ppm | Start | End | Sequence |
|---|---|---|---|---|---|---|
| 807.3 | 807.3163 | −.0325 | — | 5 | 10 | CPKCDK |
| 821.4 | 821.3269 | −.0739 | — | 1 | 7 | MASKCPK |
| 837.3 | 837.3484 | −.0473 | — | 1 | 7 | MASKCPK |
| 857.4 | 857.3639 | −.0764 | — | 1 | 17 | TVYFAEK |
| 857.4 | 857.3639 | −.0764 | — | 1 | 17 | TVYFAEK |
| 1012.4703 | 1012.433 | −.0372 | — | 2 | 34 | FCLKCER |

| | |
|---|---|
| PREDICTED: hypothetical protein | gi\|310120478 |
| LOC100507339 [Homo sapiens] | |

[0111] Peptide Information

| | Obsrv. | | | Start | End | |
|---|---|---|---|---|---|---|
| Calc. Mass | Mass | ±da | ±ppm | Seq. | Seq. | Sequence |
| 808.3406 | 808.317 | −.0236 | −29 | 113 | 118 | WNGMER |
| 837.3593 | 837.3484 | −.0109 | −13 | 165 | 171 | VECNGMK |
| 840.392 | 840.3284 | −.0636 | −76 | 106 | 112 | VEYNGMK |
| 895.3727 | 895.3547 | −.018 | −20 | 172 | 178 | WSGMERN |
| 895.3727 | 895.3547 | −.018 | −20 | 172 | 178 | WSGMERN |

| | |
|---|---|
| unknown [Homo sapiens] | gi\|62420312 |

[0112] Peptide Information

| Calc. | Obsrv. | | | Start | End | |
|---|---|---|---|---|---|---|
| Mass | Mass | ±da | ±ppm | Seq. | Seq. | Sequence |
| 822.3992 | 822.3179 | −.0813 | −99 | 5 | 10 | EEFIER |
| 842.4553 | 842.3948 | −.0605 | −72 | 58 | 64 | NMALHLK |
| 842.4553 | 842.3948 | −.0605 | −72 | 58 | 64 | NMALHLK |
| 1036.531 | 1036.4291 | −.1019 | −98 | 11 | 19 | IQGLDFDTK |

| | |
|---|---|
| zinc finger protein 726 [Homo | gi\|299890850 |
| sapiens] | |

[0113] Peptide Information

| Calc. | Obsrv. | | | Start | End | |
|---|---|---|---|---|---|---|
| Mass | Mass | ±da | ±ppm | Seq. | Seq. | Sequence |
| 804.3708 | 804.3198 | −.051 | −63 | 61 | 66 | EPWNMK |
| 820.3658 | 820.3197 | −.0461 | −56 | 61 | 66 | EPWNMK |
| 1038.5037 | 1038.4131 | −.0906 | −87 | 31 | 38 | NVMLENYR |
| 1077.5034 | 1077.4087 | −.0947 | −88 | 59 | 66 | EKEPWNMK |

| | |
|---|---|
| polyglutamine binding protein 1, | gi\|119571120 |
| isoform CRA_a [Homo sapiens] | |

[0114] Peptide Information

| | Obsrv. | | | Start | End | |
|---|---|---|---|---|---|---|
| Calc. Mass | Mass | ±da | ±ppm | Seq. | Seq. | Sequence |
| 804.3846 | 804.3198 | −.0648 | −81 | 191 | 197 | ADREEGK |
| 811.3251 | 811.3227 | −.0024 | −3 | 1 | 7 | MSDETGR |
| 814.3802 | 814.3175 | −.0627 | −77 | 157 | 163 | GHDKSDR |
| 814.3802 | 814.3175 | −.0627 | −77 | 133 | 139 | SDRGHDK |
| 824.3897 | 824.3263 | −.0634 | −77 | 187 | 193 | GYDKADR |
| 848.4148 | 848.3552 | −.0596 | −70 | 235 | 241 | EEAFPQK |
| 848.4148 | 848.3552 | −.0596 | −70 | 235 | 241 | EEAFPQK |
| 852.421 | 852.3447 | −.0763 | −90 | 168 | 174 | GYDKVDR |
| | 852.3447 | | | | | |

| | |
|---|---|
| Chain A, Solution Structure Of The | gi\|159163957 |
| Lim Domain Of Human Cysteine- | |
| Rich Protein 2 | |

[0115] Peptide Information

| Calc. | Obsrv. | | | Start | End | |
|---|---|---|---|---|---|---|
| Mass | Mass | ±da | ±ppm | Seq. | Seq. | Sequence |
| 807.3488 | 807.3163 | −.0325 | −40 | 12 | 17 | CPKCDK |
| 857.4403 | 857.3639 | −.0764 | −89 | 18 | 24 | TVYFAEK |
| 857.4403 | 857.3639 | −.0764 | −89 | 18 | 24 | TVYFAEK |
| 1012.4703 | 1012.4331 | −.0372 | −37 | 35 | 41 | FCLKCER |

| | |
|---|---|
| similar to RIKEN cDNA A430101B06 | gi\|119582663 |
| gene, isoform CRA_a [Homo sapiens] | |

[0116] Peptide Information

| | Obsrv. | | | Start | End | |
|---|---|---|---|---|---|---|
| Calc. Mass | Mass | ±da | ±ppm | Seq. | Seq. | Sequence |
| 800.3533 | 800.3335 | −.0198 | −25 | 53 | 60 | DPPDGSGR |
| 800.405 | 800.3335 | −.0715 | −89 | 47 | 52 | HLPDYR |
| 829.3574 | 829.297 | −.0604 | −73 | 29 | 35 | SYSESEK |
| 829.3574 | 829.297 | −.0604 | −73 | 29 | 35 | SYSESEK |

| | |
|---|---|
| ZNF726 protein [Homo sapiens] | gi\|71052071 |

[0117] Peptide Information

| Calc. | Obsrv. | | | Start | End | |
|---|---|---|---|---|---|---|
| Mass | Mass | ±da | ±ppm | Seq. | Seq. | Sequence |
| 804.3708 | 804.3198 | −.051 | −63 | 61 | 66 | EPWNMK |
| 820.3658 | 820.3197 | −.0461 | −56 | 61 | 66 | EPWNMK |
| 1038.5037 | 1038.4131 | −.0906 | −87 | 31 | 38 | NVMLENYR |
| 1077.5034 | 1077.4087 | −.0947 | −88 | 59 | 66 | EKEPWNMK |

| | |
|---|---|
| T-cell receptor delta chain [Homo | gi\|2239988 |
| sapiens] | |

[0118] Peptide Information

| | Obsrv. | | | | | |
|---|---|---|---|---|---|---|
| Calc. Mass | Mass | ±da | ±ppm | Start Seq. | End Seq. | Sequence |
| 817.3727 | 817.3161 | −.0566 | −69 | 15 | 21 | GSFYTDK |
| 1031.5044 | 1031.4188 | −.0856 | −83 | 15 | 23 | GSFYTDKLT |

| | |
|---|---|
| CDKN2AIPNL protein [Homo sapiens] | gi\|17390191 |

[0119] Protein Group

| | |
|---|---|
| similar to RIKEN cDNA A430101B06 gene, isoform | gi\|119582664 |
| CRA_b [Homo sapiens] | |

[0120] Peptide Information

| | Obsrv. | | | Start | End | |
|---|---|---|---|---|---|---|
| Calc. Mass | Mass | ±da | ±ppm | Seq. | Seq. | Sequence |
| 800.3533 | 800.3335 | −.0198 | −25 | 53 | 60 | DPPDGSGR |
| 800.405 | 800.3335 | −.0715 | −89 | 47 | 52 | HLPDYR |
| 829.3574 | 829.297 | −.0604 | −73 | 29 | 35 | SYSESEK |
| 829.3574 | 829.297 | −.0604 | −73 | 29 | 35 | SYSESEK |

| | |
|---|---|
| unnamed protein product [Homo sapiens] | gi\|21336226 |

[0121] Protein Group

| | |
|---|---|
| HSPC072 [Homo sapiens] | gi\|6841382 |

[0122] Peptide Information

| | Obsrv. | | | | | |
|---|---|---|---|---|---|---|
| Calc. Mass | Mass | ±da | ±ppm | Start Seq. | End Seq. | Sequence |
| 838.3909 | 838.3401 | −.0508 | −61 | 2 | 8 | MMTATQR |
| 1017.4162 | 1017.4292 | .013 | 13 | 1 | 8 | MMMTATQR |
| 1097.519 | 1097.4915 | −.0275 | −25 | 2 | 10 | MMTATQRAR |

| | |
|---|---|
| RecName: Full = Putative RNA-binding | gi\|1710620 |
| protein 3; | |
| AltName: Full = RNA-binding motif protein | |
| 3; AltName: | |
| Full = RNPL | |

[0123] Protein Group

| | |
|---|---|
| RNA binding motif (RNP1, RRM) protein | gi\|13905080 |
| 3 [Homo sapiens] | |
| RNA binding motif (RNP1, RRM) protein | gi\|119571153 |
| 3, isoform CRA_c [Homo sapiens] | |
| RNA binding motif (RNP1, RRM) protein | gi\|119571152 |
| 3, isoform CRA_c [Homo sapiens] | |
| RNPL [Homo sapiens] | gi\|881954 |
| putative RNA-binding protein 3 [Homo sapiens] | gi\|5803137 |
| unnamed protein product [Homo sapiens] | gi\|257297086 |

[0124] Peptide Information

| Calc. | Obsrv. | | | Start | End | |
|---|---|---|---|---|---|---|
| Mass | Mass | ±da | ±ppm | Seq. | Seq. | Sequence |
| 804.3958 | 804.3198 | −.076 | −94 | 40 | 45 | DRETQR |
| 809.3536 | 809.3123 | −.0413 | −51 | 139 | 145 | NQGGYDR |
| 815.3907 | 815.3253 | −.0654 | −80 | 91 | 99 | GGGFGAHGR |
| 816.3635 | 816.3242 | −.0393 | −48 | 146 | 152 | YSGGNYR |

| | |
|---|---|
| APAF1 protein [Homo sapiens] | gi\|6687822 |

[0125] Peptide Information

| | | | | | End | |
|---|---|---|---|---|---|---|
| Calc. Mass | Obsrv. Mass | ±da | ±ppm | Start Seq. | Seq. | Sequence |
| 835.4091 | 835.3354 | −.0737 | −88 | 8 | 14 | SKVADCR |
| 1014.4785 | 1014.4064 | −.0721 | −71 | 10 | 18 | VADCRGHLS |

| | |
|---|---|
| immunoglobulin heavy chain variable region | gi\|157058627 |
| [Homo sapiens] | |

[0126] Peptide Information

| | Obsrv. | | | | | |
|---|---|---|---|---|---|---|
| Calc. Mass | Mass | ±da | ±ppm | Start Seq. | End Seq. | Sequence |
| 845.4039 | 845.3217 | −.0822 | −97 | 59 | 65 | YYADSVK |
| 1017.5265 | 1017.4292 | −.0973 | −96 | 31 | 38 | SYGIHWVR |
| 1053.5323 | 1053.4489 | −.0834 | −79 | 68 | 76 | FTVSRDNSK |

| | |
|---|---|
| hCG22885, isoform CRA_a [Homo sapiens] | gi\|119602066 |

[0127] Peptide Information

| | | | | Start | End | |
|---|---|---|---|---|---|---|
| Calc. Mass | Obsrv. Mass | ±da | ±ppm | Seq. | Seq. | Sequence |
| 842.4553 | 842.3948 | −.0605 | −72 | 1 | 8 | MPAAALPR |
| 842.4553 | 842.3948 | −.0605 | −72 | 1 | 8 | MPAAALPR |
| 1053.5337 | 1053.4489 | −.0848 | −80 | 35 | 43 | AGQKGYHHR |

| | | | |
|---|---|---|---|
| | 30/B3 | | Instr./Gel |
| | | | Origin |
| | [1] Sample Project | | Instrument |
| | 20110503 | | Sample |
| | | | Name |
| Protein Name- | KH4 (SEQ ID NO. KH4) | Accession No. | |

| | |
|---|---|
| vinculin, isoform CRA_a [Homo sapiens] | gi\|119574932 |

[0128] Peptide Information

| | Obsrv. | | | Start | End | |
|---|---|---|---|---|---|---|
| Calc. Mass | Mass | ±da | ±ppm | Seq. | Seq. | Sequence |
| 802.4417 | 802.3699 | −.0718 | −89 | 574 | 582 | AAAVGTANK |
| 803.4443 | 803.3769 | −.0674 | −84 | 873 | 879 | ALIQCAK |
| 804.4461 | 804.3667 | −.0794 | −99 | 196 | 203 | ALASIDSK |
| 807.3777 | 807.4016 | .0239 | 30 | 898 | 903 | QCTDKR |
| 815.4733 | 815.4049 | −.0684 | −84 | 337 | 344 | GALAEARK |
| 817.4236 | 817.3787 | −.0449 | −55 | 90 | 97 | NLGPGMTK |
| 818.4254 | 818.3765 | −.0489 | −60 | 967 | 974 | EAEAASIK |
| 820.4047 | 820.37 | −.0347 | −42 | 712 | 719 | AASDELSK |
| 824.4625 | 824.4018 | −.0607 | −74 | 416 | 423 | AAVHLEGK |
| 833.4185 | 833.4044 | −.0141 | −17 | 236 | 243 | VGELCAGK |
| 850.4087 | 850.3828 | −.0259 | −30 | 189 | 195 | DTEAMKR |
| 866.4036 | 866.402 | −.0016 | −2 | 189 | 195 | DTEAMKR |
| 976.5244 | 976.5515 | .0271 | 28 | 246 | 253 | REILGTCK |
| 1037.599 | 1037.5863 | −.0127 | −12 | 138 | 146 | IFVTTKNSK |
| 1229.7174 | 1229.837 | .1196 | 97 | 127 | 137 | ELLPVLISAMK |
| 1229.7174 | 1229.837 | .1196 | 97 | 127 | 137 | ELLPVLISAMK |
| 1235.6487 | 1235.6796 | .0309 | 25 | 116 | 126 | VMLVNSMN |
| | | | | | | TVK |
| 1642.015 | 1641.8651 | −.1499 | −91 | 915 | 929 | IPTISTQLKIL |
| | | | | | | STVK |

| | |
|---|---|
| proopiomelanocortin, POMC = long allele product | gi\|998478 |
| [human, pituitary glands, Peptide Partial, 33 aa] | |

[0129] Peptide Information

| | | | | Start | End | |
|---|---|---|---|---|---|---|
| Calc. Mass | Obsrv. Mass | ±da | ±ppm | Seq. | Seq. | Sequence |
| 836.4162 | 836.3588 | −.0574 | −69 | 10 | 15 | WDRFGR |
| 1037.535 | 1037.5863 | .0513 | 49 | 2 | 9 | KYVMGHFR |
| 1366.6473 | 1366.6088 | −.0385 | −28 | 3 | 12 | YVMGHFRWDR |
| 1540.6947 | 1540.6804 | −.0143 | −9 | 17 | 33 | NSSSSGSSGSSG [symbol] |
| | | | | | | GQKR |

| | |
|---|---|
| unnamed protein product [Homo sapiens] | gi\|40033811 |

[symbol]

indicates data missing or illegible when filed

[0130] Protein Group

| | |
|---|---|
| unnamed protein product [Homo sapiens] | gi\|10433748 |

[0131] Peptide Information

| | | | | Start | End | |
|---|---|---|---|---|---|---|
| Calc. Mass | Obsrv. Mass | ±da | ±ppm | Seq. | Seq. | Sequence |
| 803.3893 | 803.3769 | −.0124 | −15 | 339 | 344 | LEEEQR |
| 804.3846 | 804.3667 | −.0179 | −22 | 332 | 337 | EEENRK |
| 810.4104 | 810.3868 | −.0236 | −29 | 402 | 408 | KSGYNNK |
| 810.4104 | 810.3868 | −.0236 | −29 | 402 | 408 | KSGYNNK |
| 816.4573 | 816.3807 | −.0766 | −94 | 484 | 490 | NENLAKK |
| 818.4002 | 818.3765 | −.0237 | −29 | 352 | 357 | QKEEER |
| 825.3988 | 825.3849 | −.0139 | −17 | 363 | 368 | EYEEKK |
| 826.4457 | 826.3818 | −.0639 | −77 | 296 | 302 | AFVAYQK |
| 864.4131 | 864.4175 | .0044 | 5 | 492 | 498 | CSEELVK |
| 907.3639 | 907.4031 | .0392 | 43 | 27 | 34 | EDNESDAK |
| 912.4131 | 912.3611 | −.052 | −57 | 232 | 238 | MNDELYK |
| 919.4367 | 919.4315 | −.0052 | −6 | 2 | 9 | DDDDAKLK |
| 976.4945 | 976.5515 | .057 | 58 | 510 | 518 | TELGNSDLK |
| 1017.5098 | 1017.5444 | .0346 | 34 | 10 | 18 | AEIEAELDK |
| 1540.6948 | 1540.6804 | −.0144 | −9 | 227 | 238 | QEQDKMNDELYK |

| | |
|---|---|
| zinc finger protein 770 [Homo sapiens] | gi\|46094072 |

[0132] Protein Group

| | |
|---|---|
| RecName: Full = Zinc finger protein 770 | gi\|74757996 |
| Zinc finger protein 770 [Homo sapiens] | gi\|47938791 |
| hypothetical protein FLJ20582 [Homo sapiens] | gi\|119612730 |
| unnamed protein product [Homo sapiens] | gi\|158256312 |

[0133] Peptide Information

| Calc. Mass | Obsrv. Mass | ±da | ±ppm | Start Seq. | End Seq. | Sequence |
|---|---|---|---|---|---|---|
| 807.4723 | 807.4016 | −.0707 | −88 | 224 | 230 | GFKIQSK |
| 808.4312 | 808.3741 | −.0571 | −71 | 633 | 639 | SFRSPSK |
| 816.4573 | 816.3807 | −.0766 | −94 | 636 | 642 | SPSKLER |
| 823.3549 | 823.3546 | −.0003 | 0 | 83 | 88 | CSICQR |
| 823.3549 | 823.3546 | −.0003 | 0 | 83 | 88 | CSICQR |
| 824.3971 | 824.4018 | .0047 | 6 | 168 | 174 | MFPSQSK |
| 830.4155 | 830.4167 | .0012 | 1 | 328 | 333 | RSYNYK |
| 833.4437 | 833.4044 | −.0393 | −47 | 684 | 691 | VVALDSVM |
| 835.3978 | 835.3892 | −.0086 | −10 | 2 | 8 | MAENNLK |
| 845.4152 | 845.4222 | .007 | 8 | 35 | 41 | HFETPSK |
| 910.4893 | 910.4322 | −.0571 | −63 | 671 | 677 | HQLTHFK |
| 919.522 | 919.4315 | −.0905 | −98 | 234 | 240 | HKQIHTR |
| 998.4876 | 998.4788 | −.0088 | −9 | 139 | 146 | WALHPCSK |
| 998.4876 | 998.4788 | −.0088 | −9 | 139 | 146 | WALHPCSK |
| 1235.5773 | 1235.6796 | .1023 | 83 | 83 | 91 | CSICQRHFK |

| | |
|---|---|
| FGF-5 protein 1 [Homo sapiens] | gi\|182541 |

[0134] Peptide Information

| Calc. Mass | Obsrv. Mass | ±da | ±ppm | Start Seq. | End Seq. | Sequence |
|---|---|---|---|---|---|---|
| 807.4294 | 807.4016 | −.0278 | −34 | 29 | 35 | MHLGPPR |
| 823.4243 | 823.3546 | −.0697 | −85 | 29 | 35 | MHLGPPR |
| 823.4243 | 823.3546 | −.0697 | −85 | 29 | 35 | MHLGPPR |
| 848.4261 | 848.419 | −.0071 | −8 | 22 | 28 | AQNQPYK |
| 848.4261 | 848.419 | −.0071 | −8 | 22 | 28 | AQNQPYK |
| 864.3628 | 864.4175 | .0547 | 63 | 5 | 12 | CGEAGQSR |
| 1540.7034 | 1540.6804 | −.023 | −15 | 5 | 18 | CGEAGQSRG |
| | | | | | | TQPHR |

[0135] Protein Group

| | |
|---|---|
| Short = VACVase; Short = Valacyclovirase; | |
| Full = Biphenyl hydrolase-like protein; | |
| Full = Biphenyl hydrolase-related protein; | |
| Short = Bph-rp; | |
| antigen; Short = MCNAA; Flags: | |
| biphenyl hydrolase-like (serine | gi\|2895059 |
| epithelial mucin-associated antigen) | |
| biphenyl hydrolase-like protein [Homo sapiens] | gi\|3991880 |

[0136] Peptide Information

| | Obsrv. | | | Start | End | |
|---|---|---|---|---|---|---|
| Calc. Mass | Mass | ±da | ±ppm | Seq. | Seq. | Sequence |
| 807.3917 | 807.4016 | .0099 | 12 | 120 | 126 | DAVDLMK |
| 818.4553 | 818.3765 | −.0788 | −96 | 1 | 8 | MVAVLGGR |
| 835.4196 | 835.3892 | −.0304 | −36 | 285 | 291 | LAEDFLQ |
| 907.4672 | 907.4031 | −.0641 | −71 | 152 | 158 | YPSYIHK |
| 940.4921 | 940.4529 | −.0392 | −42 | 264 | 271 | LHLMPEGK |
| 1141.5498 | 1141.5339 | −.0159 | −14 | 98 | 107 | GYGHSRPPDR |
| 1227.7355 | 1227.8146 | .0791 | 64 | 1 | 12 | MVAVLGGRGVLR |

| | |
|---|---|
| hCG2045292 [Homo sapiens] | gi\|119593419 |

[0137] Peptide Information

| Calc. Mass | Obsrv. Mass | ±da | ±ppm | Start Seq. | End Seq. | Sequence |
|---|---|---|---|---|---|---|
| 807.4029 | 807.4016 | −.0013 | −2 | 4 | 9 | IEDMKR |
| 847.4407 | 847.4076 | −.0331 | −39 | 11 | 17 | ELTEEVK |
| 850.4338 | 850.3828 | −.051 | −60 | 2 | 8 | SKIEDMK |
| 866.4288 | 866.402 | −.0268 | −31 | 2 | 8 | SKIEDMK |
| 998.5305 | 998.4788 | −.0517 | −52 | 58 | 65 | LFSFEISR |
| 998.5305 | 998.4788 | −.0517 | −52 | 58 | 65 | LFSFEISR |
| 1017.4847 | 1017.5444 | .0597 | 59 | 18 | 26 | KGDQEEPSK |

| | |
|---|---|
| Chain A, Solution Structure Of Human Mekk3 Pb1 | gi\|149243322 |
| Domain | |

[0138] Protein Group

| | |
|---|---|
| Chain A, Solution Sturcture Of Human Mekk3 Pb1 | gi\|152149163 |
| Domain Cis Isomer | |

[0139] Peptide Information

| Calc. Mass | Obsrv. Mass | ±da | ±ppm | Start Seq. | End Seq. | Sequence |
|---|---|---|---|---|---|---|
| 815.4621 | 815.4049 | −.0572 | −70 | 63 | 69 | AIDILDR |
| 845.4839 | 845.4222 | −.0617 | −73 | 2 | 8 | QSDVRIK |
| 847.3792 | 847.4076 | .0284 | 34 | 56 | 62 | NQDDLDK |
| 919.4156 | 919.4315 | .0159 | 17 | 26 | 32 | YEDVEHK |
| 976.5244 | 976.5515 | .0271 | 28 | 1 | 8 | MQSDVRIK |

| | |
|---|---|
| KIAA1893 protein [Homo sapiens] | gi\|15620845 |

[0140] Peptide Information

| | Obsrv. | | | Start | End | |
|---|---|---|---|---|---|---|
| Calc. Mass | Mass | ±da | ±ppm | Seq. | Seq. | Sequence |
| 801.4213 | 801.3785 | −.0428 | −53 | 624 | 631 | ADPRASGK |
| 802.4305 | 802.3699 | −.0606 | −76 | 275 | 282 | VAPTSAEK |
| | 802.3699 | | | | | |
| 817.405 | 817.3787 | −.0263 | −32 | 481 | 488 | VNPESSGK |
| 818.4254 | 818.3765 | −.0489 | −60 | 704 | 711 | TESPSLGK |
| 823.4308 | 823.3546 | −.0762 | −93 | 227 | 233 | TYTVSPR |
| 823.4308 | 823.3546 | −.0762 | −93 | 227 | 233 | TYTVSPR |
| 830.4982 | 830.4167 | −.0815 | −98 | 283 | 290 | VDLVLSGK |
| 856.4774 | 856.5166 | .0392 | 46 | 187 | 194 | AEPEILGK |
| 858.4025 | 858.3828 | −.0197 | −23 | 155 | 161 | MDFKSSK |
| 858.4025 | 858.3828 | −.0197 | −23 | 155 | 161 | MDFKSSK |
| 866.4077 | 866.402 | −.0057 | −7 | 179 | 186 | ADPMFTGK |
| 912.4421 | 912.3611 | −.081 | −89 | 267 | 274 | EHPVSSEK |
| 931.4479 | 931.4319 | −.016 | −17 | 466 | 474 | EDPISAGSR |
| 1017.5211 | 1017.5444 | .0233 | 23 | 663 | 671 | KETPQASEK |
| 1598.7778 | 1598.7869 | .0091 | 6 | 195 | 209 | GDPVAPGRMDPMTVR |

| | |
|---|---|
| unnamed protein product [Homo sapiens] | gi\|193785261 |

[0141] Peptide Information

| | Obsrv. | | | Start | End | |
|---|---|---|---|---|---|---|
| Calc. Mass | Mass | ±da | ±ppm | Seq. | Seq. | Sequence |
| 802.4417 | 802.3699 | −.0718 | −89 | 574 | 582 | AAAVGTANK |
| 803.4443 | 803.3769 | −.0674 | −84 | 873 | 879 | ALIQCAK |
| 804.4461 | 804.3667 | −.0794 | −99 | 196 | 203 | ALASIDSK |
| 807.3777 | 807.4016 | .0239 | 30 | 898 | 903 | QCTDKR |
| 815.4733 | 815.4049 | −.0684 | −84 | 337 | 344 | GALAEARK |
| 817.4236 | 817.3787 | −.0449 | −55 | 90 | 97 | NLGPGMTK |
| 820.4047 | 820.37 | −.0347 | −42 | 712 | 719 | AASDELSK |
| 824.4625 | 824.4018 | −.0607 | −74 | 416 | 423 | AAVHLEGK |
| 833.4185 | 833.4044 | −.0141 | −17 | 236 | 243 | VGELCAGK |
| 850.4087 | 850.3828 | −.0259 | −30 | 189 | 195 | DTEAMKR |
| 866.4036 | 866.402 | −.0016 | −2 | 189 | 195 | DTEAMKR |
| 976.5244 | 976.5515 | .0271 | 28 | 246 | 253 | REILGTCK |
| 1037.599 | 1037.5863 | −.0127 | −12 | 138 | 146 | IFVTTKNSK |
| 1229.7174 | 1229.837 | .1196 | 97 | 127 | 137 | ELLPVLISAMK |
| 1229.7174 | 1229.837 | .1196 | 97 | 127 | 137 | ELLPVLISAMK |
| 1235.6487 | 1235.6796 | .0309 | 25 | 116 | 126 | VMLVNSMN |
| | | | | | | TVK |
| 1642.015 | 1641.8651 | −.1499 | −91 | 915 | 929 | IPTISTQLKIL |
| | | | | | | STVK |

| | |
|---|---|
| unnamed protein product [Homo sapiens] | gi\|40039998 |

[0142] Peptide Information

| | Obsrv. | | | Start | End | |
|---|---|---|---|---|---|---|
| Calc. Mass | Mass | ±da | ±ppm | Seq. | Seq. | Sequence |
| 816.4322 | 816.3807 | −.0515 | −63 | 62 | 68 | LREEGGR |
| 826.3512 | 826.3818 | .0306 | 37 | 74 | 80 | ARSFCGE |
| 836.3745 | 836.3588 | −.0157 | −19 | 54 | 61 | ESGTEASR |
| 1598.8875 | 1598.7869 | −.1006 | −63 | 2 | 16 | TTFVGLRPQPGGR |
| | | | | | | GR |

| | |
|---|---|
| unnamed protein product [Homo sapiens] | gi\|7019891 |

[0143] Peptide Information

| | | | | Start | End | |
|---|---|---|---|---|---|---|
| Calc. Mass | Obsrv. Mass | ±da | ±ppm | Seq. | Seq. | Sequence |
| 808.4233 | 808.3741 | −.0492 | −61 | 253 | 259 | VTKMDSK |
| 820.4159 | 820.37 | −.0459 | −56 | 362 | 368 | VERSDSK |
| 824.4182 | 824.4018 | −.0164 | −20 | 253 | 259 | VTKMDSK |
| 830.4366 | 830.4167 | −.0199 | −24 | 478 | 484 | VPSDKER |
| 833.4224 | 833.4044 | −.018 | −22 | 413 | 420 | AEAGSRSR |
| 845.4264 | 845.4222 | −.0042 | −5 | 83 | 89 | LADHFSR |
| 848.4512 | 848.419 | −.0322 | −38 | 398 | 405 | FGLGTPEK |
| 848.4512 | 848.419 | −.0322 | −38 | 398 | 405 | FGLGTPEK |
| 858.454 | 858.3828 | −.0712 | −83 | 369 | 376 | SSPQAGRR |
| 858.454 | 858.3828 | −.0712 | −83 | 369 | 376 | SSPQAGRR |
| 1141.5848 | 1141.5339 | −.0509 | −45 | 20 | 29 | QDLIHASTEK |
| 1598.7917 | 1598.7869 | −.0048 | −3 | 377 | 391 | YGVQVMGSGLLAE |
| | | | | | | MK |
| 1914.9478 | 1914.8485 | −.0993 | −52 | 299 | 315 | SERPPTILMTEEPS |
| | | | | | | SPK |
| 1914.9478 | 1914.8485 | −.0993 | −52 | 299 | 315 | SERPPTILMTEEPS |
| | | | | | | SPK |

| | |
|---|---|
| Chain B, Crystal Structure Of The Complex Of | gi\|122921331 |
| Human Mitogen Activated Protein | |
| Kinase Kinase 5 Phox | |
| Domain (Map2k5-Phox) With | |
| Human Mitogen Activated | |
| Protein Kinase Kinase | |
| Kinase 3 (Map3k3b-Phox) | |

[0144] Peptide Information

| | Obsrv. | | | Start | End | |
|---|---|---|---|---|---|---|
| Calc. Mass | Mass | ±da | ±ppm | Seq. | Seq. | Sequence |
| 804.3417 | 804.3667 | .025 | 31 | 1 | 7 | SMGHSNR |
| 815.4621 | 815.4049 | −.0572 | −70 | 69 | 75 | AIDILDR |
| 845.4839 | 845.4222 | −.0617 | −73 | 8 | 14 | QSDVRIK |
| 847.3792 | 847.4076 | .0284 | 34 | 62 | 68 | NQDDL |
| | | | | | | DK |
| | 847.4076 | | | | | |
| 919.4156 | 919.4315 | .0159 | 17 | 32 | 38 | YEDVE |
| | | | | | | HK |

| | |
|---|---|
| 2-aminoethanethiol dioxygenase | gi\|62177110 |
| [Homo sapiens] | |

[0145] Protein Group

| | |
|---|---|
| 2-aminoethanethiol (cysteamine) | gi\|62739235 |
| dioxygenase [Homo sapiens] | |
| RecName: Full = 2-aminoethanethiol | gi\|88984104 |
| dioxygenase; | |
| AltName: Full = Cysteamine dioxygenase | |
| chromosome 10 open reading frame 22 | gi\|123237966 |
| [Homo sapiens] | |
| chromosome 10 open reading frame 22, isoform CRA_a | gi\|119574620 |
| [Homo sapiens] | |

[0146] Peptide Information

| | Obsrv. | | | Start | End | |
|---|---|---|---|---|---|---|
| Calc. Mass | Mass | ±da | ±ppm | Seq. | Seq. | Sequence |
| 807.4723 | 807.4016 | −.0707 | −88 | 123 | 129 | VLYGTVR |
| 976.4555 | 976.5515 | .096 | 98 | 23 | 33 | GSGGGRGASDR |
| 998.5265 | 998.4788 | −.0477 | −48 | 63 | 71 | AEDLNIAPR |
| 998.5265 | 998.4788 | −.0477 | −48 | 63 | 71 | AEDLNIAPR |
| 1235.6677 | 1235.6796 | .0119 | 10 | 13 | 22 | IARQACLTFR |
| 1366.6646 | 1366.6088 | −.0558 | −41 | 16 | 28 | QACLTFRGSGGGR |
| 1914.9314 | 1914.8485 | −.0829 | −43 | 105 | 122 | SGTSIPLHDHPGMH |
| | | | | | | GMLK |
| 1914.9314 | 1914.8485 | −.0829 | −43 | 105 | 122 | SGTSIPLHDHPGMH |
| | | | | | | GMLK |

| | |
|---|---|
| Rap guanine nucleotide exchange factor (GEF) 1 | gi\|57208996 |
| [Homo sapiens] | |

[0147] Protein Group

| | |
|---|---|
| Rap guanine nucleotide exchange factor (GEF) 1 | gi\|55958113 |
| [Homo sapiens] | |

[0148] Peptide Information

| Calc. Mass | Obsrv. Mass | ±da | ±ppm | Start Seq. | End Seq. | Sequence |
|---|---|---|---|---|---|---|
| 815.4846 | 815.4049 | −.0797 | −98 | 2 | 9 | SGGLGLRR |
| 856.5039 | 856.5166 | .0127 | 15 | 38 | 44 | FHSPKIK |
| 907.4302 | 907.4031 | −.0271 | −30 | 9 | 16 | RSPEMSGK |
| 1037.5085 | 1037.5863 | .0778 | 75 | 25 | 33 | SHLSSFTMK |
| 1211.6783 | 1211.7719 | .0936 | 77 | 78 | 87 | EVVSALRYFK |
| | 1211.7719 | | | | | |
| 1211.6783 | 1211.7719 | .0936 | 77 | 78 | 87 | EVVSALRYFK |
| 1380.6101 | 1380.6191 | .009 | 7 | 147 | 158 | WSDQVMLEGVNS |
| 1540.7499 | 1540.6804 | −.0695 | −45 | 25 | 37 | SHLSSFTMKLMDK |

| | |
|---|---|
| vinculin isoform meta-VCL [Homo sapiens] | gi\|7669550 |

[0149] Protein Group

| | |
|---|---|
| RecName: Full = Vinculin; AltName: | gi\|21903479 |
| Full = Metavinculin | |
| vinculin, isoform CRA_b [Homo sapiens] | gi\|119574934 |
| vinculin, isoform CRA_b [Homo sapiens] | gi\|119574933 |

[0150] Peptide Information

| | | | | Start | End | |
|---|---|---|---|---|---|---|
| Calc. Mass | Obsrv. Mass | ±da | ±ppm | Seq. | Seq. | Sequence |
| 802.4417 | 802.3699 | −.0718 | −89 | 647 | 655 | AAAVGTANK |
| 803.4443 | 803.3769 | −.0674 | −84 | 1014 | 1020 | ALIQCAK |
| 804.4461 | 804.3667 | −.0794 | −99 | 269 | 276 | ALASIDSK |
| 807.3777 | 807.4016 | .0239 | 30 | 1039 | 1044 | QCTDKR |
| 815.4733 | 815.4049 | −.0684 | −84 | 410 | 417 | GALAEARK |
| 817.4236 | 817.3787 | −.0449 | −55 | 163 | 170 | NLGPGMTK |
| 818.4254 | 818.3765 | −.0489 | −60 | 1108 | 1115 | EAEAASIK |
| 820.4047 | 820.37 | −.0347 | −42 | 785 | 792 | AASDELSK |
| 824.4625 | 824.4018 | −.0607 | −74 | 489 | 496 | AAVHLEGK |
| 833.4185 | 833.4044 | −.0141 | −17 | 309 | 316 | VGELCAGK |
| 850.4087 | 850.3828 | −.0259 | −30 | 262 | 268 | DTEAMKR |
| 866.4036 | 866.402 | −.0016 | −2 | 262 | 268 | DTEAMKR |
| 976.5244 | 976.5515 | .0271 | 28 | 319 | 326 | REILGTCK |
| 1037.599 | 1037.5863 | −.0127 | −12 | 211 | 219 | IFVTTKNSK |
| 1229.7174 | 1229.837 | .1196 | 97 | 200 | 210 | ELLPVLISAMK |
| 1229.7174 | 1229.837 | .1196 | 97 | 200 | 210 | ELLPVLISAMK |
| 1235.6487 | 1235.6796 | .0309 | 25 | 189 | 199 | VMLVNSMNTVK |
| 1642.015 | 1641.8651 | −.1499 | −91 | 1056 | 1070 | IPTISTQLKILSTVK |

| | |
|---|---|
| BRCA1 [Homo sapiens] | gi\|237930356 |

[0151] Peptide Information

| Calc. | | | | Start | End | |
|---|---|---|---|---|---|---|
| Mass | Obsrv. Mass | ±da | ±ppm | Seq. | Seq. | Sequence |
| 800.3978 | 800.361 | −.0368 | −46 | 19 | 24 | WVVSYF |
| 812.4301 | 812.3808 | −.0493 | −61 | 11 | 18 | YFLGAGGK |
| 910.4087 | 910.4322 | .0235 | 26 | 1 | 7 | AEFVCER |

| | |
|---|---|
| myeloid/lymphoid or mixed-lineage | gi\|56202443 |
| leukemia (trithorax homolog, | |
| Drosophila | |
| sapiens] | |

[0152] Protein Group

| | |
|---|---|
| myeloid/lymphoid or mixed-lineage leukemia (trithorax | gi\|57209650 |
| homolog, Drosophila sapiens] | |

[0153] Peptide Information

| Calc. | Obsrv. | | | Start | End | |
|---|---|---|---|---|---|---|
| Mass | Mass | ±da | ±ppm | Seq. | Seq. | Sequence |
| 818.3751 | 818.3765 | .0014 | 2 | 1 | 7 | GGRDEER |
| 820.3431 | 820.37 | .0269 | 33 | 237 | 244 | SSDGRPDS |
| 830.4003 | 830.4167 | .0164 | 20 | 138 | 145 | AQSNGPEK |
| 837.4036 | 837.434 | .0304 | 36 | 76 | 81 | FRPDMR |
| 847.3985 | 847.4076 | .0091 | 11 | 42 | 47 | FYFQDK |
| 848.4988 | 848.419 | −.0798 | −94 | 121 | 127 | EGRFVLK |
| 848.4988 | 848.419 | −.0798 | −94 | 121 | 127 | EGRFVLK |
| 866.4301 | 866.402 | −.0281 | −32 | 231 | 236 | RMQEFR |
| 1017.5323 | 1017.5444 | .0121 | 12 | 173 | 181 | EALRQAS |
| | | | | | | DK |

| | |
|---|---|
| unnamed protein product | gi\|164691141 |
| [Homo sapiens] | |

[0154] Peptide Information

| | Calc. | Obsrv. | | Start | End | |
|---|---|---|---|---|---|---|
| Mass | Mass | ±da | ±ppm | Seq. | Seq. | Sequence |
| 804.4461 | 804.3667 | −.0794 | −99 | 138 | 144 | SKEIEAK |
| 825.3988 | 825.3849 | −.0139 | −17 | 5 | 11 | LSGEYEK |
| 830.4981 | 830.4167 | −.0814 | −98 | 140 | 146 | EIEAKIK |
| 835.456 | 835.3892 | −.0668 | −80 | 71 | 77 | LFEELGK |
| 848.3706 | 848.419 | .0484 | 57 | 207 | 213 | LPEMDID |
| 848.3706 | 848.419 | .0484 | 57 | 207 | 213 | LPEMDID |
| 867.3843 | 867.3481 | −.0362 | −42 | 12 | 18 | FVSEDDR |
| 976.4655 | 976.5515 | .086 | 88 | 206 | 213 | KLPEMDID |

| | |
|---|---|
| biphenyl hydrolase-like (serine | gi\|119575525 |
| hydrolase; breast epithelial | |
| mucin-associated antigen), | |
| isoform CRA_c | |
| [Homo sapiens] | |

[0155] Peptide Information

| Calc. | Obsrv. | | | Start | End | |
|---|---|---|---|---|---|---|
| Mass | Mass | ±da | ±ppm | Seq. | Seq. | Sequence |
| 803.3795 | 803.3769 | −.0026 | −3 | 15 | 22 | AEGGAGWR |
| 807.3917 | 807.4016 | .0099 | 12 | 177 | 183 | DAVDLMK |
| 835.4196 | 835.3892 | −.0304 | −36 | 342 | 348 | LAEDFLQ |
| 853.4461 | 853.3766 | −.0695 | −81 | 1 | 8 | MGKHPAGR |
| 907.4672 | 907.4031 | −.0641 | −71 | 209 | 215 | YPSYIHK |
| 940.4921 | 940.4529 | −.0392 | −42 | 321 | 328 | LHLMPEGK |
| 1141.5498 | 1141.5339 | −.0159 | −14 | 155 | 164 | GYGHSRPP |
| | | | | | | DR |

| | |
|---|---|
| 58/C7 | Instr./Gel Origin |
| [1] Sample Project | |
| 20110503 | |
| | Instrument Sample |

| | | |
|---|---|---|
| Accession No. | Protein Name | Name |

| | |
|---|---|
| | KH5 (SEQ ID NO. KH5) |
| gi\|119626258 | PR domain containing 8, |
| | isoform CRA_b [Homo sapiens] |
| | Peptide Information |

| Calc. | Obsrv. | | | Start | End | |
|---|---|---|---|---|---|---|
| Mass | Mass | ±da | ±ppm | Seq. | Seq. | Sequence |
| 817.446 | 817.423 | −.023 | −28 | 149 | 155 | MNGRLAR |
| 818.4003 | 818.369 | −.0313 | −38 | 2 | 8 | EDTGIQR |
| 916.521 | 916.5026 | −.0184 | −20 | 91 | 98 | LVQSARDK |
| 959.4475 | 959.4648 | .0173 | 18 | 145 | 152 | SHNKMNGR |
| 965.4357 | 965.4838 | .0481 | 50 | 1 | 8 | MEDTGIQR |
| 1051.6047 | 1051.6862 | .0815 | 78 | 66 | 73 | RTVPYIFR |

| | |
|---|---|
| rhomboid 5 homolog 2 (Drosophila), | gi\|119609809 |
| isoform CRA_c [Homo sapiens] | |

[0156] Peptide Information

| Calc. Mass | Obsrv. Mass | ±da | ±ppm | Start Seq. | End Seq. | Sequence |
|---|---|---|---|---|---|---|
| 803.437 | 803.3735 | −.0635 | −79 | 198 | 204 | SDLGQKR |
| 817.4162 | 817.423 | .0068 | 8 | 151 | 156 | ERDLER |
| 870.4866 | 870.5401 | .0535 | 61 | 2 | 9 | MSLIPGPR |
| 920.4737 | 920.4175 | −.0562 | −61 | 20 | 26 | HFAFDRK |
| 1023.5469 | 1023.4952 | −.0517 | −51 | 103 | 111 | NKGVYESVK |
| 1026.5878 | 1026.4934 | −.0944 | −92 | 2 | 10 | MSLIPGPRR |
| 1156.6514 | 1156.6008 | −.0506 | −44 | 318 | 327 | LWLSLFLHAG |
| 1156.6514 | 1156.6008 | −.0506 | −44 | 318 | 327 | LWLSLFLHAG |
| 1933.8597 | 1933.9708 | .1111 | 57 | 187 | 203 | WQDDTGPPMD |
| | | | | | | KSDLGQK |
| 1933.8597 | 1933.9708 | .1111 | 57 | 187 | 203 | WQDDTGPPMD |
| | | | | | | KSDLGQK |

| | |
|---|---|
| centaurin, delta 2, isoform CRA_a | gi\|119595269 |
| [Homo sapiens] | |

[0157] Peptide Information

| Calc. | Obsrv. | | | Start | End | |
|---|---|---|---|---|---|---|
| Mass | Mass | ±da | ±ppm | Seq. | Seq. | Sequence |
| 800.4737 | 800.4516 | −.0221 | −28 | 759 | 764 | LLQDRR |
| 807.4723 | 807.3954 | −.0769 | −95 | 1313 | 1318 | LYKEVR |
| 808.3981 | 808.4063 | .0082 | 10 | 994 | 1000 | KCGQTSK |
| 811.3944 | 811.4203 | .0259 | 32 | 250 | 256 | EEPPPSR |
| 815.4733 | 815.4612 | −.0121 | −15 | 1211 | 1217 | NVGIREK |
| 846.5196 | 846.4929 | −.0267 | −32 | 865 | 871 | LGRLPYK |
| 869.4475 | 869.3638 | −.0837 | −96 | 352 | 358 | LDTDHLR |
| 869.4475 | 869.3638 | −.0837 | −96 | 352 | 358 | LDTDHLR |
| 870.5659 | 870.5401 | −.0258 | −30 | 167 | 174 | LLVSLPTK |
| 885.4108 | 885.4137 | .0029 | 3 | 572 | 578 | RCAGEHR |
| 894.4427 | 894.3779 | −.0648 | −72 | 765 | 771 | AREEFSR |
| 913.4672 | 913.4619 | −.0053 | −6 | 637 | 643 | RCHLEAK |
| 933.4636 | 933.41 | −.0536 | −57 | 401 | 408 | AESDVERK |
| 1933.916 | 1933.9708 | .0548 | 28 | 1369 | 1383 | HEKQQCQA |
| | | | | | | FGIMWVR |
| 1934.0171 | 1933.9708 | −.0463 | −24 | 736 | 752 | HYSVVLPT |
| | | | | | | VSHSGFL |
| | | | | | | YK |

| | |
|---|---|
| unnamed protein product | gi\|193783575 |
| [Homo sapiens] | |

[0158] Peptide Information

| Calc. | Obsrv. | | | Start | End | |
|---|---|---|---|---|---|---|
| Mass | Mass | ±da | ±ppm | Seq. | Seq. | Sequence |
| 826.4457 | 826.3953 | −.0504 | −61 | 7 | 13 | LPPGWEK |
| 856.4709 | 856.5273 | .0564 | 66 | 57 | 63 | CSHLLVK |
| 856.4709 | 856.5273 | .0564 | 66 | 57 | 63 | CSHLLVK |
| 890.4512 | 890.3947 | −.0565 | −63 | 128 | 136 | GAQGMGL |
| | | | | | | TR |
| 982.5468 | 982.4728 | −.074 | −75 | 7 | 14 | LPPGWEKR |
| 984.4421 | 984.4333 | −.0088 | −9 | 137 | 145 | LGDPYHP |
| | | | | | | EG |
| 1693.8439 | 1693.8403 | −.0036 | −2 | 120 | 136 | GDLGAFSR |
| | | | | | | GAGQGMG |
| | | | | | | LTR |

| | |
|---|---|
| immunoglobulin light chain | gi\|194173413 |
| [Homo sapiens] | |

[0159] Peptide Information

| Calc. | Obsrv. | | | Start | End | |
|---|---|---|---|---|---|---|
| Mass | Mass | ±da | ±ppm | Seq. | Seq. | Sequence |
| 869.357 | 869.3638 | .0068 | 8 | 214 | 220 | SFNRGEC |
| 869.357 | 869.3638 | .0068 | 8 | 214 | 220 | SFNRGEC |
| 890.4366 | 890.3947 | −.0419 | −47 | 190 | 196 | ADYEKHK |
| 1156.582 | 1156.6008 | .0188 | 16 | 52 | 60 | LLMYWAS |
| | | | | | | TR |
| 1156.582 | 1156.6008 | .0188 | 16 | 52 | 60 | LLMYWAS |
| | | | | | | TR |
| 1933.9536 | 1933.9708 | .0172 | 9 | 1 | 18 | DIVMTQSP |
| | | | | | | DSLAVSLG |
| | | | | | | ER |
| 1933.9536 | 1933.9708 | .0172 | 9 | 1 | 18 | DIVMTQSP |
| | | | | | | DSLAVSLG |
| | | | | | | ER |
| 1946.027 | 1946.0345 | .0075 | 4 | 115 | 132 | TVAAPSVF |
| | | | | | | IFPPSDEQ |
| | | | | | | LK |

| | |
|---|---|
| hCG2041853 | gi\|119606879 |
| [Homo sapiens] | |

[0160] Peptide Information

| Calc. | Obsrv. | | | Start | End | |
|---|---|---|---|---|---|---|
| Mass | Mass | ±da | ±ppm | Seq. | Seq. | Sequence |
| 848.4512 | 848.4214 | −.0298 | −35 | 29 | 35 | DFQPITK |
| 848.4512 | 848.4214 | −.0298 | −35 | 29 | 35 | DFQPITK |
| 863.4734 | 863.439 | −.0344 | −40 | 90 | 96 | TFKPTNR |
| 894.3951 | 894.3779 | −.0172 | −19 | 17 | 23 | EDFQEAR |
| 1003.5054 | 1003.4797 | −.0257 | −26 | 82 | 89 | EAEEREIK |
| 1022.4901 | 1022.4993 | .0092 | 9 | 17 | 24 | EDFQEARK |

| | |
|---|---|
| unknown [Homo sapiens] | gi\|41474316 |

[0161] Peptide Information

| | Obsrv. | | | Start | End | |
|---|---|---|---|---|---|---|
| Calc. Mass | Mass | ±da | ±ppm | Seq. | Seq. | Sequence |
| 807.3917 | 807.3954 | .0037 | 5 | 11 | 17 | MDTDVVK |
| 815.437 | 815.4612 | .0242 | 30 | 2 | 9 | SSPSPGKR |
| 920.4757 | 920.4175 | −.0582 | −63 | 11 | 18 | MDTDVVKL |
| 963.4928 | 963.4443 | −.0485 | −50 | 10 | 17 | RMDTDVVK |

| | |
|---|---|
| NF-kappa-B essential modulator isoform | gi\|53792133 |
| a [Homo sapiens] | |

[0162] Protein Group

| | |
|---|---|
| IKBKG protein [Homo sapiens] | gi\|116283880 |
| IKBKG protein [Homo sapiens] | |
| IKBKG protein [Homo sapiens] | gi\|29792042 |
| IKBKG protein [Homo sapiens] | gi\|12653067 |
| IKBKG protein [Homo sapiens] | gi\|15082399 |
| IkB kinase gamma subunit [Homo sapiens] | gi\|3641280 |
| NEMO protein [Homo sapiens] | gi\|5031141 |
| NF-KB Essential Modulator [Homo sapiens] | gi\|8249458 |
| NF-kB essential modulator NEMO [Homo sapiens] | gi\|9802304 |
| NF-kappa-B essential modulator isoform a [Homo | gi\|4504631 |
| sapiens] | |
| NFkappaB essential modulator [Homo sapiens] | gi\|16596512 |
| RecName: Full = NF-kappa-B essential modulator; | gi\|6685695 |
| Short = NEMO; AltName: | |
| Full = FIP-3; AltName: | |
| Full = IkB kinase-associated | |
| protein 1; Short = IKKAP1; | |
| AltName: Full = Inhibitor of | |
| nuclear factor kappa-B | |
| kinase subunit gamma; | |
| Short = I-kappa-B kinase | |
| subunit gamma; Short = IKK- | |
| gamma; Short = IKKG; | |
| Short = IkB kinase subunit | |
| gamma; AltName: Full = NF- | |
| kappa-B essential modifier | |
| inhibitor of kappa light polypeptide gene enhancer in | gi\|54696110 |
| B-cells, kinase gamma [Homo sapiens] | |

[0163] Peptide Information

| | | | | Start | End | |
|---|---|---|---|---|---|---|
| Calc. Mass | Obsrv. Mass | ±da | ±ppm | Seq. | Seq. | Sequence |
| 807.4029 | 807.3954 | −.0075 | −9 | 353 | 358 | IEDMRK |
| 808.4199 | 808.4063 | −.0136 | −17 | 303 | 309 | AQADIYK |
| 836.3897 | 836.3643 | −.0254 | −30 | 310 | 316 | ADFQAER |
| 872.4948 | 872.4182 | −.0766 | −88 | 117 | 123 | QKEQALR |
| 908.389 | 908.4195 | .0305 | 34 | 345 | 352 | ASCQESAR |
| 933.4709 | 933.41 | −.0609 | −65 | 257 | 264 | GMQLEDLK |
| 948.5109 | 948.464 | −.0469 | −49 | 247 | 255 | SSVVGSERK |
| 959.5016 | 959.4648 | −.0368 | −38 | 174 | 182 | ARAASEQAR |
| 984.5196 | 984.4333 | −.0863 | −88 | 1 | 7 | MNRHLWK |
| 1934.0668 | 1933.9708 | −.096 | −50 | 293 | 309 | IVMETVPVLKAQADI |
| | | | | | | YK |
| 1934.0668 | 1933.9708 | −.096 | −50 | 293 | 309 | IVMETVPVLKAQADI |
| | | | | | | YK |

| | |
|---|---|
| helix-loop-helix protein transcription | gi\|84445 |
| factor 4 [Homo sapiens] | |

[0164] Peptide Information

| Calc. | Obsrv. | | | Start | End | |
|---|---|---|---|---|---|---|
| Mass | Mass | ±da | ±ppm | Seq. | Seq. | Sequence |
| 817.4414 | 817.423 | −.0184 | −23 | 259 | 265 | SEKPQTK |
| 832.4206 | 832.4689 | .0483 | 58 | 228 | 234 | RMANNAR |
| 836.4148 | 836.3643 | −.0505 | −60 | 241 | 247 | DINEAFK |
| 848.4155 | 848.4214 | .0059 | 7 | 228 | 234 | RMANNAR |
| 848.4155 | 848.4214 | .0059 | 7 | 228 | 234 | RMANNAR |
| 870.4791 | 870.5401 | .061 | 70 | 285 | 291 | ERNLNPK |
| 895.364 | 895.3758 | .0118 | 13 | 189 | 196 | SDDESSQK |
| 945.4571 | 945.4341 | −.023 | −24 | 111 | 119 | SASMVGT |
| | | | | | | HR |
| 1051.5895 | 1051.6862 | .0967 | 92 | 56 | 64 | LDDAIHV |
| | | | | | | LR |

[0165] Peptide Information

| | Obsrv. | | | Start | | |
|---|---|---|---|---|---|---|
| Calc. Mass | Mass | ±da | ±ppm | Seq. | End Seq. | Sequence |
| 832.5291 | 832.4689 | −.0602 | −72 | 27 | 33 | LSIPKFK |
| 959.523 | 959.4648 | −.0582 | −61 | 34 | 41 | VEKMIDPK |
| 1023.5945 | 1023.4952 | −.0993 | −97 | 68 | 77 | GVALSNVVHK |
| 1095.631 | 1095.5862 | −.0448 | −41 | 119 | 127 | TRNIIFFGK |
| 1933.8121 | 1933.9708 | .1587 | 82 | 51 | 67 | HIFSEDTSDFSGMS |
| | | | | | | ETK |
| 1933.8121 | 1933.9708 | .1587 | 82 | 51 | 67 | HIFSEDTSDFSGMS |
| | | | | | | ETK |

| | |
|---|---|
| hCG1788266, iso form CRA_a [Homo sapiens] | gi\|119575210 |

[0166] Peptide Information

| Calc. | Obsrv. | | | Start | End | |
|---|---|---|---|---|---|---|
| Mass | Mass | ±da | ±ppm | Seq. | Seq. | Sequence |
| 807.3851 | 807.3954 | .0103 | 13 | 348 | 353 | MVICER |
| 811.4713 | 811.4203 | −.051 | −63 | 38 | 43 | FIFEKK |
| 817.4778 | 817.423 | −.0548 | −67 | 356 | 362 | NKSVELK |
| 856.4675 | 856.5273 | .0598 | 70 | 175 | 181 | FKAFSTR |
| 856.4675 | 856.5273 | .0598 | 70 | 175 | 181 | FKAFSTR |
| 890.4764 | 890.3947 | −.0817 | −92 | 2 | 9 | TMDALLAR |
| 894.4349 | 894.3779 | −.057 | −64 | 524 | 531 | ATTSVEMR |
| 908.5101 | 908.4195 | −.0906 | −100 | 444 | 451 | AGFLHHVK |
| 965.4686 | 965.4838 | .0152 | 16 | 182 | 189 | EDAEKFAR |
| 1022.5121 | 1022.4993 | −.0128 | −13 | 348 | 355 | MVICERSK |
| 1037.5118 | 1037.6041 | .0923 | 89 | 1 | 9 | MTMDALL |
| | | | | | | AR |

| | |
|---|---|
| inhibitor of kappa light polypeptide | gi\|11959308 |
| B-cells, kinase gamma, isoform | |
| Protein Group | |
| inhibitor of kappa light polypeptide | gi\|11959308 |
| B-cells, kinase gamma, isoform | |

[0167] Peptide Information

| | Obsrv. | | | Start | End | |
|---|---|---|---|---|---|---|
| Calc. Mass | Mass | ±da | ±ppm | Seq. | Seq. | Sequence |
| 807.4029 | 807.3954 | −.0075 | −9 | 168 | 173 | IEDMRK |
| 808.4199 | 808.4063 | −.0136 | −17 | 118 | 124 | AQADIYK |
| 836.3897 | 836.3643 | −.0254 | −30 | 125 | 131 | ADFQAER |
| 908.389 | 908.4195 | .0305 | 34 | 160 | 167 | ASCQESAR |
| 933.4709 | 933.41 | −.0609 | −65 | 72 | 79 | GMQLEDLK |
| 948.5109 | 948.464 | −.0469 | −49 | 62 | 70 | SSVVGSERK |
| 1934.0668 | 1933.9708 | −.096 | −50 | 108 | 124 | IVMETVPVLKAQADI |
| | | | | | | YK |
| 1934.0668 | 1933.9708 | −.096 | −50 | 108 | 124 | IVMETVPVLKAQADI |
| | | | | | | YK |

| | |
|---|---|
| Chain A, Solution Structure Of The C- | gi\|159163551 |
| Terminal Gal-Bind | |
| Lectin Domain From Human Galectin-4 | |

[0168] Peptide Information

| | | | | Start | | |
|---|---|---|---|---|---|---|
| Calc. Mass | Obsrv. Mass | ±da | ±ppm | Seq. | End Seq. | Sequence |
| 815.4734 | 815.4612 | −.0122 | −15 | 33 | 40 | LQGGLTAR |
| 818.4407 | 818.369 | −.0717 | −88 | 47 | 54 | GYVPPTGK |
| 826.4457 | 826.3953 | −.0504 | −61 | 55 | 61 | SFAINFK |
| 895.4454 | 895.3758 | −.0696 | −78 | 115 | 121 | CGLDRFK |
| 1945.9919 | 1946.0345 | .0426 | 22 | 98 | 114 | ITHNPFGPGQFFD |
| | | | | | | SIR |

| | |
|---|---|
| leucine zipper protein Fip3p [Homo sapiens] | gi\|3511151 |

[0169] Peptide Information

| | | | | Start | End | |
|---|---|---|---|---|---|---|
| Calc. Mass | Obsrv. Mass | ±da | ±ppm | Seq. | Seq. | Sequence |
| 807.4029 | 807.3954 | −.0075 | −9 | 353 | 358 | IEDMRK |
| 808.4199 | 808.4063 | −.0136 | −17 | 303 | 309 | AQADIYK |
| 836.3897 | 836.3643 | −.0254 | −30 | 310 | 316 | ADFQAER |
| 872.4948 | 872.4182 | −.0766 | −88 | 117 | 123 | QKEQALR |
| 908.389 | 908.4195 | .0305 | 84 | 345 | 352 | ASCQESAR |
| 933.4709 | 933.41 | −.0609 | −65 | 257 | 264 | GMQLEDLK |
| 948.5109 | 948.464 | −.0469 | −49 | 247 | 255 | SSVVGSERK |
| 959.5016 | 959.4648 | −.0368 | −38 | 174 | 182 | ARAASEQAR |
| 984.5196 | 984.4333 | −.0863 | −88 | 1 | 7 | MNRHLWK |
| 1934.0668 | 1933.9708 | −.096 | −50 | 293 | 309 | IVMETVPVLKAQADI |
| | | | | | | YK |
| 1934.0668 | 1933.9708 | −.096 | −50 | 293 | 309 | IVMETVPVLKAQADI |
| | | | | | | YK |

| | |
|---|---|
| Chain A, Crystal Structure Of Human Nemo Cc2_lz | gi\|226438304 |
| Domain | |

[0170] Protein Group

| | |
|---|---|
| Chain B, Crystal Structure Of Human Nemo Cc2_Iz | gi\|226438305 |
| Domain | |

[0171] Peptide Information

| | | | | Start | End | |
|---|---|---|---|---|---|---|
| Calc. Mass | Obsrv. Mass | ±da | ±ppm | Seq. | Seq. | Sequence |
| 808.4199 | 808.4063 | −.0136 | −17 | 62 | 68 | AQADIYK |
| 836.3897 | 836.3643 | −.0254 | −30 | 69 | 75 | ADFQAER |
| 933.4709 | 933.41 | −.0609 | −65 | 16 | 23 | GMQLEDLK |
| 948.5109 | 948.464 | −.0469 | −49 | 6 | 14 | SSVVGSERK |
| 1934.0668 | 1933.9708 | −.096 | −50 | 52 | 68 | IVMETVPVLKAQA [symbol] |
| | | | | | | YK |
| 1934.0668 | 1933.9708 | −.096 | −50 | 52 | 68 | IVMETVPVLKAQA [symbol] |
| | | | | | | YK |

| | |
|---|---|
| unnamed protein product [Homo sapiens] | gi\|194381172 |

[symbol]

indicates data missing or illegible when filed

[0172] Peptide Information

| Calc. | Obsrv. | | | Start | End | |
|---|---|---|---|---|---|---|
| Mass | Mass | ±da | ±ppm | Seq. | Seq. | Sequence |
| 817.4414 | 817.423 | −.0184 | −23 | 244 | 250 | SEKPQTK |
| 832.4206 | 832.4689 | .0483 | 58 | 213 | 219 | RMANNAR |
| 836.4148 | 836.3643 | −.0505 | −60 | 226 | 232 | DINEAFK |
| 848.4155 | 848.4214 | .0059 | 7 | 213 | 219 | RMANNAR |
| 848.4155 | 848.4214 | .0059 | 7 | 213 | 219 | RMANNAR |
| 870.4791 | 870.5401 | .061 | 70 | 270 | 276 | ERNLNPK |
| 895.364 | 895.3758 | .0118 | 13 | 174 | 181 | SDDESSQK |
| 945.4571 | 945.4341 | −.023 | −24 | 96 | 104 | SASMVGT |
| | | | | | | HR |
| 1051.5895 | 1051.6862 | .0967 | 92 | 41 | 49 | LDDAIHV |
| | | | | | | LR |

| | |
|---|---|
| NADH dehydrogenase [ubiquinone] | gi\|297206774 |
| 1 alpha subcomplex sub [symbol] | |

[symbol]

indicates data missing or illegible when filed

[0173] Peptide Information

| Calc. | Obsrv. | | | Start | End | |
|---|---|---|---|---|---|---|
| Mass | Mass | ±da | ±ppm | Seq. | Seq. | Sequence |
| 807.4359 | 807.3954 | −.0405 | −50 | 35 | 40 | DFIEKR |
| 826.4352 | 826.3953 | −.0399 | −48 | 21 | 26 | IHLCQR |
| 856.5363 | 856.5273 | −.009 | −11 | 14 | 20 | LGLREIR |
| 856.5363 | 856.5273 | −.009 | −11 | 14 | 20 | LGLREIR |
| | 856.5273 | | | | | |
| 870.5519 | 870.5401 | −.0118 | −14 | 9 | 17 | GVGAKLG |
| | | | | | | LR |
| 1022.553 | 1022.4993 | −.0537 | −53 | 65 | 72 | LWARYASR |

| | |
|---|---|
| unnamed protein product [Homo sapiens] | gi\|40038502 |

[0174] Peptide Information

| | | | | Start | End | |
|---|---|---|---|---|---|---|
| Calc. Mass | Obsrv. Mass | ±da | ±ppm | Seq. | Seq. | Sequence |
| 825.4287 | 825.3579 | −.0708 | −86 | 1 | 6 | MRFEVK |
| 870.5308 | 870.5401 | .0093 | 11 | 87 | 93 | AFLHVKR |
| 908.4724 | 908.4195 | −.0529 | −58 | 22 | 28 | DLYLQEK |
| 963.3911 | 963.4443 | .0532 | 55 | 14 | 21 | TCSSMFSK |
| 1811.9513 | 1811.8953 | −.056 | −31 | 42 | 56 | IMYTVSFIIHIDGFR |

| | |
|---|---|
| metallophosphoesterase 1, isoform | gi\|119621966 |
| CRA_a [Homo sapiens] | |

[0175] Peptide Information

| Calc. | Obsrv. | | | Start | End | |
|---|---|---|---|---|---|---|
| Mass | Mass | ±da | ±ppm | Seq. | Seq. | Sequence |
| 807.4359 | 807.3954 | −.0405 | −50 | 171 | 176 | VERFEK |
| 815.437 | 815.4612 | .0242 | 30 | 286 | 292 | EASQKPR |
| 856.4498 | 856.5273 | .0775 | 90 | 139 | 144 | FQKMFR |
| 856.4498 | 856.5273 | .0775 | 90 | 139 | 144 | FQKMFR |
| 872.4447 | 872.4182 | −.0265 | −30 | 139 | 144 | FQKMFR |
| 890.4438 | 890.3947 | −.0491 | −55 | 226 | 233 | EQARGSSR |
| 894.3774 | 894.3779 | .0005 | 1 | 95 | 100 | EWQMER |
| 945.5265 | 945.4341 | −.0924 | −98 | 145 | 152 | HPSHVQLK |
| 1156.549 | 1156.6008 | .0518 | 45 | 1 | 10 | MAMIELG |
| | | | | | | FGR |
| 1156.549 | 1156.6008 | .0518 | 45 | 1 | 10 | MAMIELG |
| | | | | | | FGR |

| | |
|---|---|
| unnamed protein product [Homo sapiens] | gi\|40042838 |

[0176] Peptide Information

| Calc. | Obsrv. | | | Start | End | |
|---|---|---|---|---|---|---|
| Mass | Mass | ±da | ±ppm | Seq. | Seq. | Sequence |
| 800.4447 | 800.4516 | .0069 | 9 | 56 | 62 | VGMQIPR |
| 803.4193 | 803.3735 | −.0458 | −57 | 16 | 22 | SPKGCVR |
| 815.5349 | 815.4612 | −.0737 | −90 | 8 | 15 | KALVGLSK |
| 817.4202 | 817.423 | .0028 | 3 | 99 | 105 | GWNILTN |
| 1037.5006 | 1037.6041 | .1035 | 100 | 77 | 84 | MCLVEIEK |

| | 39/B12 | | Instr./Gel Origin |
|---|---|---|---|
| | [1] Sample Project | | Instrument |
| | 20110503 | | Sample |
| | | | Name |
| Protein Name- | KH6 (SEQ ID NO. | Accession No. | |
| | KH6) | | |

unnamed protein product [Homo sapiens]

[0177] Peptide Information

| | Obsrv. | | | Start | | |
|---|---|---|---|---|---|---|
| Calc. Mass | Mass | ±da | ±ppm | Seq. | End Seq. | Sequence |
| 813.4399 | 813.4365 | −.0034 | −4 | 349 | 355 | LHIMAGR |
| 828.4111 | 828.4147 | .0036 | 4 | 55 | 60 | SHKWDR |
| 1070.5742 | 1070.5751 | .0009 | 1 | 191 | 199 | GEVPPRYPR |
| 1141.5889 | 1141.5903 | .0014 | 1 | 310 | 320 | GGYTLVSGYPK |
| 1142.6317 | 1142.6177 | −.014 | −12 | 80 | 89 | QGHNSVFLIK |
| 1158.4707 | 1158.4716 | .0009 | 1 | 203 | 211 | DYFMPCPGR |
| 1158.4707 | 1158.4716 | .0009 | 1 | 203 | 211 | DYFMPCPGR |
| 1220.606 | 1220.6044 | −.0016 | −1 | 69 | 79 | NFPSPVDAAFR |
| 1220.606 | 1220.6044 | −.0016 | −1 | 69 | 79 | NFPSPVDAAFR |
| 1268.6747 | 1268.6769 | .0022 | 2 | 186 | 196 | FDPVRGEVPPR |
| 1268.6747 | 1268.6769 | .0022 | 2 | 186 | 196 | FDPVRGEVPPR |
| 1495.6787 | 1495.6715 | −.0072 | −5 | 175 | 185 | YYCFQGNQFLR |
| 1495.6787 | 1495.6715 | −.0072 | −5 | 175 | 185 | YYCFQGNQFLR |
| 1528.6672 | 1528.6715 | .0043 | 3 | 200 | 211 | DVRDYFMPCPGR |
| 1528.6672 | 1528.6715 | .0043 | 3 | 200 | 211 | DVRDYFMPCPGR |
| 1534.7802 | 1534.7703 | −.0099 | −6 | 67 | 79 | WKNFPSPVDAAFR |
| 1712.7698 | 1712.7891 | .0193 | 11 | 129 | 143 | GECQAEGVLFFQ |
| | | | | | | GDR |
| 2364.1653 | 2364.1553 | −.01 | −4 | 108 | 128 | LLQDEFPGIPSP |
| | | | | | | LDAAVE CHR |
| 2498.2344 | 2498.2322 | −.0022 | −1 | 325 | 348 | EVGTPHGIILDSV |
| | | | | | | DAAFIC |
| | | | | | | PGSSR |
| 2498.2344 | 2498.2322 | −.0022 | −1 | 325 | 348 | EVGTPHGIILDSV |
| | | | | | | DAAFIC |
| | | | | | | PGSSR |

| | |
|---|---|
| hemopexin, isoform CRA_b | gi\|119589125 |
| [Homo sapiens] | |

[0178] Protein Group

| | |
|---|---|
| RecName: Full = Hemopexin; | gi\|1708182 |
| AltName: | |
| Full = Beta-1B-glycoprotein; Flags: | |
| Precursor | |
| hemopexin [Homo sapiens] | gi\|184497 |
| hemopexin precursor [Homo sapiens] | gi\|11321561 |
| hemopexin precursor [Homo sapiens] | gi\|386789 |
| unnamed protein product [Homo sapiens] | gi\|189053897 |
| unnamed protein product [Homo sapiens] | gi\|80747621 |

[0179] Peptide Information

| | Obsrv. | | | Start | | |
|---|---|---|---|---|---|---|
| Calc. Mass | Mass | ±da | ±ppm | Seq. | End Seq. | Sequence |
| 813.4399 | 813.4365 | −.0034 | −4 | 372 | 378 | LHIMAGR |
| 828.4111 | 828.4147 | .0036 | 4 | 78 | 83 | SHKWDR |
| 1070.5742 | 1070.5751 | .0009 | 1 | 214 | 222 | GEVPPRYPR |
| 1141.5889 | 1141.5903 | .0014 | 1 | 333 | 343 | GGYTLVSGYPK |
| 1142.6317 | 1142.6177 | −.014 | −12 | 103 | 112 | QGHNSVFLIK |
| 1158.4707 | 1158.4716 | .0009 | 1 | 226 | 234 | DYFMPCPGR |
| 1158.4707 | 1158.4716 | .0009 | 1 | 226 | 234 | DYFMPCPGR |
| 1220.606 | 1220.6044 | −.0016 | −1 | 92 | 102 | NFPSPVDAAFR |
| 1220.606 | 1220.6044 | −.0016 | −1 | 92 | 102 | NFPSPVDAAFR |
| 1268.6747 | 1268.6769 | .0022 | 2 | 209 | 219 | FDPVRGEVPPR |
| 1268.6747 | 1268.6769 | .0022 | 2 | 209 | 219 | FDPVRGEVPPR |
| 1495.6787 | 1495.6715 | −.0072 | −5 | 198 | 208 | YYCFQGNQFLR |
| 1495.6787 | 1495.6715 | −.0072 | −5 | 198 | 208 | YYCFQGNQFLR |
| 1528.6672 | 1528.6715 | .0043 | 3 | 223 | 234 | DVRDYFMPCPGR |
| 1528.6672 | 1528.6715 | .0043 | 3 | 223 | 234 | DVRDYFMPCPGR |
| 1534.7802 | 1534.7703 | −.0099 | −6 | 90 | 102 | WKNFPSPVDAA |
| | | | | | | FR |
| 1712.7698 | 1712.7891 | .0193 | 11 | 152 | 166 | GECQAEGVLFF |
| | | | | | | QGDR |
| 2364.1653 | 2364.1553 | −.01 | −4 | 131 | 151 | LLQDEFPGIPSP |
| | | | | | | LDAAVE |
| | | | | | | CHR |
| 2498.2344 | 2498.2322 | −.0022 | −1 | 348 | 371 | EVGTPHGIILDSV |
| | | | | | | DAAFIC |
| | | | | | | PGSSR |
| 2498.2344 | 2498.2322 | −.0022 | −1 | 348 | 371 | EVGTPHGIILDSV |
| | | | | | | DAAFIC |
| | | | | | | PGSSR |

| | |
|---|---|
| HPX protein [Homo sapiens] | gi\|13529281 |

[0180] Peptide Information

| | | | | Start | | |
|---|---|---|---|---|---|---|
| Calc. Mass | Obsrv. Mass | ±da | ±ppm | Seq. | End Seq. | Sequence |
| 828.4111 | 828.4147 | .0036 | 4 | 78 | 83 | SHKWDR |
| 1070.5742 | 1070.5751 | .0009 | 1 | 214 | 222 | GEVPPRYPR |
| 1142.6317 | 1142.6177 | −.014 | −12 | 103 | 112 | QGHNSVFLIK |
| 1158.4707 | 1158.4716 | .0009 | 1 | 226 | 234 | DYFMPCPGR |
| 1158.4707 | 1158.4716 | .0009 | 1 | 226 | 234 | DYFMPCPGR |
| 1220.606 | 1220.6044 | −.0016 | −1 | 92 | 102 | NFPSPVDAAFR |
| 1220.606 | 1220.6044 | −.0016 | −1 | 92 | 102 | NFPSPVDAAFR |
| 1268.6747 | 1268.6769 | .0022 | 2 | 209 | 219 | FDPVRGEVPPR |
| 1268.6747 | 1268.6769 | .0022 | 2 | 209 | 219 | FDPVRGEVPPR |
| 1495.6787 | 1495.6715 | −.0072 | −5 | 198 | 208 | YYCFQGNQFLR |
| 1495.6787 | 1495.6715 | −.0072 | −5 | 198 | 208 | YYCFQGNQFLR |
| 1528.6672 | 1528.6715 | .0043 | 3 | 223 | 234 | DVRDYFMPCPGR |
| 1528.6672 | 1528.6715 | .0043 | 3 | 223 | 234 | DVRDYFMPCPGR |
| 1534.7802 | 1534.7703 | −.0099 | −6 | 90 | 102 | WKNFPSPVDAA |
| | | | | | | FR |
| 1712.7698 | 1712.7891 | .0193 | 11 | 152 | 166 | GECQAEGVLFF |
| | | | | | | QGDR |
| 2364.1653 | 2364.1553 | −.01 | −4 | 131 | 151 | LLQDEFPGIPSP |
| | | | | | | LDAAVE |
| | | | | | | CHR |

| | |
|---|---|
| hemopexin, isoform CRA_d [Homo sapiens] | gi\|119589127 |

[0181] Peptide Information

| | | | | Start | | |
|---|---|---|---|---|---|---|
| Calc. Mass | Obsrv. Mass | ±da | ±ppm | Seq. | End Seq. | Sequence |
| 813.4399 | 813.4365 | −.0034 | −4 | 301 | 307 | LHIMAGR |
| 828.4111 | 828.4147 | .0036 | 4 | 78 | 83 | SHKWDR |
| 1141.5889 | 1141.5903 | .0014 | 1 | 262 | 272 | GGYTLVSGYPK |
| 1142.6317 | 1142.6177 | −.014 | −12 | 103 | 112 | QGHNSVFLIK |
| 1220.606 | 1220.6044 | −.0016 | −1 | 92 | 102 | NFPSPVDAAFR |
| 1220.606 | 1220.6044 | −.0016 | −1 | 92 | 102 | NFPSPVDAAFR |
| 1534.7802 | 1534.7703 | −.0099 | −6 | 90 | 102 | WKNFPSPVDAAFR |
| 2364.1653 | 2364.1553 | −.01 | −4 | 131 | 151 | LLQDEFPGIPSP |
| | | | | | | LDAAVE |
| | | | | | | CHR |
| 2498.2344 | 2498.2322 | −.0022 | −1 | 277 | 300 | EVGTPHGIILDSV |
| | | | | | | DAAFIC |
| | | | | | | PGSSR |
| 2498.2344 | 2498.2322 | −.0022 | −1 | 277 | 300 | EVGTPHGIILDSV |
| | | | | | | DAAFIC |
| | | | | | | PGSSR |

| | |
|---|---|
| hemopexin, isoform CRA_a [Homo sapiens] | gi\|119589124 |

[0182] Peptide Information

| | | | | Start | | |
|---|---|---|---|---|---|---|
| Calc. Mass | Obsrv. Mass | ±da | ±ppm | Seq. | End Seq. | Sequence |
| 813.4399 | 813.4365 | −.0034 | −4 | 118 | 124 | LHIMAGR |
| 1141.5889 | 1141.5903 | .0014 | 1 | 79 | 89 | GGYTLVSGYPK |
| 2498.2344 | 2498.2322 | −.0022 | −1 | 94 | 117 | EVGTPHGIILDSV |
| | | | | | | DAAFIC |
| | | | | | | PGSSR |
| 2498.2344 | 2498.2322 | −.0022 | −1 | 94 | 117 | EVGTPHGIILDSV |
| | | | | | | DAAFIC |
| | | | | | | PGSSR |

| | |
|---|---|
| hemopexin | gi\|226337 |

[0183] Peptide Information

| | Obsrv. | | | Start | | |
|---|---|---|---|---|---|---|
| Calc. Mass | Mass | ±da | ±ppm | Seq. | End Seq. | Sequence |
| 1141.5889 | 1141.5903 | .0014 | 1 | 78 | 88 | GGYTLVSGYPK |
| 2498.2344 | 2498.2322 | −.0022 | −1 | 93 | 116 | EVGTPHGIILDSV |
| | | | | | | DAAFIC |
| | | | | | | PGSSR |
| 2498.2344 | 2498.2322 | −.0022 | −1 | 93 | 116 | EVGTPHGIILDSV |
| | | | | | | DAAFIC |
| | | | | | | PGSSR |

| | |
|---|---|
| hemopexin, isoform CRA_c [Homo sapiens] | gi\|119589126 |

[0184] Peptide Information

| | | | | Start | | |
|---|---|---|---|---|---|---|
| Calc. Mass | Obsrv. Mass | ±da | ±ppm | Seq. | End Seq. | Sequence |
| 813.4399 | 813.4365 | −.0034 | −4 | 170 | 176 | LHIMAGR |
| 1141.5889 | 1141.5903 | .0014 | 1 | 131 | 141 | GGYTLVSGYPK |
| 2498.2344 | 2498.2322 | −.0022 | −1 | 146 | 169 | EVGTPHGIILDSV |
| | | | | | | DAAFIC |
| | | | | | | PGSSR |
| 2498.2344 | 2498.2322 | −.0022 | −1 | 146 | 169 | EVGTPHGIILDSV |
| | | | | | | DAAFIC |
| | | | | | | PGSSR |

| | |
|---|---|
| unnamed protein product [Homo sapiens] | gi\|221044726 |

[0185] Peptide Information

| | Obsrv. | | | | | |
|---|---|---|---|---|---|---|
| Calc. Mass | Mass | ±da | ±ppm | Start Seq. | End Seq. | Sequence |
| 828.4111 | 828.4147 | .0036 | 4 | 78 | 83 | SHKWDR |
| 1142.6317 | 1142.6177 | −.014 | −12 | 103 | 112 | QGHNSVFLIK |
| 1220.606 | 1220.6044 | −.0016 | −1 | 92 | 102 | NFPSPVDAAFR |
| 1220.606 | 1220.6044 | −.0016 | −1 | 92 | 102 | NFPSPVDAAFR |

| | |
|---|---|
| albumin, | gi\|119626074 |
| isoform CRA_k [Homo | |
| sapiens] | |

[0186] Peptide Information

| | | | | Start | | |
|---|---|---|---|---|---|---|
| Calc. Mass | Obsrv. Mass | ±da | ±ppm | Seq. | End Seq. | Sequence |
| 875.5098 | 875.5068 | −.003 | −3 | 51 | 57 | LSQRFPK |
| 960.5625 | 960.5635 | .001 | 1 | 235 | 242 | FQNALLVR |
| 1084.6586 | 1084.5902 | −.0684 | −63 | 45 | 54 | ALAVARLSQR |
| 1084.6586 | 1084.5902 | −.0684 | −63 | 45 | 54 | ALAVARLSQR |
| 1141.694 | 1141.5903 | −.1037 | −91 | 406 | 417 | KLVAASQAALGL |
| 1149.5759 | 1149.6154 | .0395 | 34 | 25 | 34 | DAHKSEVAHR |
| 1311.7419 | 1311.6891 | −.0528 | −40 | 170 | 180 | HPDYSVVLLLR |
| 1358.6298 | 1358.6514 | .0216 | 16 | 378 | 389 | AVMDDFAAFVEK |
| 1467.8431 | 1467.8401 | −.003 | −2 | 169 | 180 | RHPDYSVVLLLR |
| 1511.8429 | 1511.7273 | −.1156 | −76 | 247 | 260 | VPQVSTPTLVE |
| | | | | | | VSR |
| 1546.7968 | 1546.7734 | −.0234 | −15 | 107 | 118 | LKECCEKPLLEK |
| 1639.9379 | 1639.8716 | −.0663 | −40 | 246 | 260 | KVPQVSTPTLV |
| | | | | | | EVSR |
| 1684.821 | 1684.8859 | .0649 | 39 | 95 | 108 | YICENQDSISS |
| | | | | | | KLK |
| 1684.821 | 1684.8859 | .0649 | 39 | 95 | 108 | YICENQDSISS |
| | | | | | | KLK |
| 1910.9318 | 1910.9291 | −.0027 | −1 | 317 | 332 | RPCFSALEVDE |
| | | | | | | TYVPK |

| | |
|---|---|
| unnamed protein product [Homo sapiens] | gi\|194391112 |

[0187] Peptide Information

[0188] Protein Group

| | | | | Start | End | |
|---|---|---|---|---|---|---|
| Calc. Mass | Obsrv. Mass | ±da | ±ppm | Seq. | Seq. | Sequence |
| 875.5098 | 875.5068 | −.003 | −3 | 157 | 163 | LSQRFPK |
| 927.4934 | 927.4922 | −.0012 | −1 | 76 | 82 | YLYEIAR |
| 960.5625 | 960.5635 | .001 | 1 | 341 | 348 | FQNALLVR |
| 1141.694 | 1141.5903 | −.1037 | −91 | 512 | 523 | KLVAASQAALGL |
| 1149.5759 | 1149.6154 | .0395 | 34 | 25 | 34 | DAHKSEVAHR |
| 1220.6885 | 1220.6044 | −.0841 | −69 | 66 | 75 | LVNEETFLKK |
| 1220.6885 | 1220.6044 | −.0841 | −69 | 66 | 75 | LVNEETFLKK |
| 1311.7419 | 1311.6891 | −.0528 | −40 | 276 | 286 | HPDYSVVLLLR |
| 1358.6298 | 1358.6514 | .0216 | 16 | 484 | 495 | AVMDDFAAFVEK |
| 1467.8431 | 1467.8401 | −.003 | −2 | 275 | 286 | RHPDYSVVLLLR |
| 1511.8429 | 1511.7273 | −.1156 | −76 | 353 | 366 | VPQVSTPTLVEVSR |
| 1546.7968 | 1546.7734 | −.0234 | −15 | 213 | 224 | LKECCEKPLLEK |
| 1639.9379 | 1639.8716 | −.0663 | −40 | 352 | 366 | KVPQVSTPTLVEV |
| | | | | | | SR |
| 1684.821 | 1684.8859 | .0649 | 39 | 201 | 214 | YICENQDSISSKLK |
| 1684.821 | 1684.8859 | .0649 | 39 | 201 | 214 | YICENQDSISSKLK |
| 1910.9318 | 1910.9291 | −.0027 | −1 | 423 | 438 | RPCFSALEVDETY |
| | | | | | | VPK |

| | |
|---|---|
| albumin, isoform CRA_m [Homo | gi\|119626076 |
| sapiens] | |
| PRO2619 [Homo sapiens] | gi\|11493459 |

[0189] Peptide Information

| | Obsrv. | | | Start | | |
|---|---|---|---|---|---|---|
| Calc. Mass | Mass | ±da | ±ppm | Seq. | End Seq. | Sequence |
| 875.5098 | 875.5068 | −.003 | −3 | 133 | 139 | LSQRFPK |
| 927.4934 | 927.4922 | −.0012 | −1 | 52 | 58 | YLYEIAR |
| 960.5625 | 960.5635 | .001 | 1 | 317 | 324 | FQNALLVR |
| 1141.694 | 1141.5903 | −.1037 | −91 | 488 | 499 | KLVAASQAALGL |
| 1311.7419 | 1311.6891 | −.0528 | −40 | 252 | 262 | HPDYSVVLLLR |
| 1358.6298 | 1358.6514 | .0216 | 16 | 460 | 471 | AVMDDFAAFV |
| | | | | | | EK |
| 1467.8431 | 1467.8401 | −.003 | −2 | 251 | 262 | RHPDYSVVLLLR |
| 1510.6083 | 1510.6826 | .0743 | 49 | 1 | 12 | MADCCAKQEP |
| | | | | | | ER |
| 1511.8429 | 1511.7273 | −.1156 | −76 | 329 | 342 | VPQVSTPTLVE |
| | | | | | | VSR |
| 1546.7968 | 1546.7734 | −.0234 | −15 | 189 | 200 | LKECCEKPLLEK |
| 1639.9379 | 1639.8716 | −.0663 | −40 | 328 | 342 | KVPQVSTPTLV |
| | | | | | | EVSR |
| 1684.821 | 1684.8859 | .0649 | 39 | 177 | 190 | YICENQDSISS |
| | | | | | | KLK |
| 1684.821 | 1684.8859 | .0649 | 39 | 177 | 190 | YICENQDSISS |
| | | | | | | KLK |
| 1910.9318 | 1910.9291 | −.0027 | −1 | 399 | 414 | RPCFSALEVDE |
| | | | | | | TYVPK |

ALB protein [Homo sapiens]

[0190] Protein Group

| | |
|---|---|
| growth-inhibiting protein 20 [Homo sapiens] | gi\|27692693 |
| | gi\|47118015 |

[0191] Peptide Information

| | | | | Start | End | |
|---|---|---|---|---|---|---|
| Calc. Mass | Obsrv. Mass | ±da | ±ppm | Seq. | Seq. | Sequence |
| 875.5098 | 875.5068 | −.003 | −3 | 51 | 57 | LSQRFPK |
| 960.5625 | 960.5635 | .001 | 1 | 235 | 242 | FQNALLVR |
| 1141.694 | 1141.5903 | −.1037 | −91 | 406 | 417 | KLVAASQAALGL |
| 1149.5759 | 1149.6154 | .0395 | 34 | 25 | 34 | DAHKSEVAHR |
| 1311.7419 | 1311.6891 | −.0528 | −40 | 170 | 180 | HPDYSVVLLLR |
| 1358.6298 | 1358.6514 | .0216 | 16 | 378 | 389 | AVMDDFAAFVEK |
| 1467.8431 | 1467.8401 | −.003 | −2 | 169 | 180 | RHPDYSVVLLLR |
| 1511.8429 | 1511.7273 | −.1156 | −76 | 247 | 260 | VPQVSTPTLVEVSR |
| 1546.7968 | 1546.7734 | −.0234 | −15 | 107 | 118 | LKECCEKPLLEK |
| 1639.9379 | 1639.8716 | −.0663 | −40 | 246 | 260 | KVPQVSTPTLVEV |
| | | | | | | SR |
| 1684.821 | 1684.8859 | .0649 | 39 | 95 | 108 | YICENQDSISSKLK |
| 1684.821 | 1684.8859 | .0649 | 39 | 95 | 108 | YICENQDSISSKLK |
| 1910.9318 | 1910.9291 | −.0027 | −1 | 317 | 332 | RPCFSALEVDETY |
| | | | | | | VPK |

| | |
|---|---|
| Chain A, Human Serum Albumin Mutant R218h | gi\|31615330 |
| Complexed With | |
| Thyroxine (3,3′,5,5′- | |
| Tetraiodo-L-Thyronine) | |

[0192] Protein Group

| | |
|---|---|
| Chain A, Human Serum Albumin Mutant R218h | gi\|31615333 |
| Complexed With Thyroxine | |
| (3,3′,5,5′-Tetraiodo-L-Thyronine) And Myristic Acid | |
| (Tetradecanoic Acid) | |

[0193] Peptide Information

| | Obsrv. | | | Start | | |
|---|---|---|---|---|---|---|
| Calc. Mass | Mass | ±da | ±ppm | Seq. | End Seq. | Sequence |
| 927.4934 | 927.4922 | −.0012 | −1 | 138 | 144 | YLYEIAR |
| 960.5625 | 960.5635 | .001 | 1 | 403 | 410 | FQNALLVR |
| 1141.694 | 1141.5903 | −.1037 | −91 | 574 | 585 | KLVAASQAALGL |
| 1149.615 | 1149.6154 | .0004 | 0 | 42 | 51 | LVNEVTEFAK |
| 1311.7419 | 1311.6891 | −.0528 | −40 | 338 | 348 | HPDYSVVLLLR |
| 1358.6298 | 1358.6514 | .0216 | 16 | 546 | 557 | AVMDDFAAFVEK |
| 1467.8431 | 1467.8401 | −.003 | −2 | 337 | 348 | RHPDYSVVLLLR |
| 1510.8278 | 1510.6826 | −.1452 | −96 | 213 | 225 | AWAVAHLSQRFPK |
| 1511.8429 | 1511.7273 | −.1156 | −76 | 415 | 428 | VPQVSTPTLVEVSR |
| 1546.7968 | 1546.7734 | −.0234 | −15 | 275 | 286 | LKECCEKPLLEK |
| 1639.9379 | 1639.8716 | −.0663 | −40 | 414 | 428 | KVPQVSTPTLVEV |
| | | | | | | SR |
| 1684.821 | 1684.8859 | .0649 | 39 | 263 | 276 | YICENQDSISSKLK |
| 1684.821 | 1684.8859 | .0649 | 39 | 263 | 276 | YICENQDSISSKLK |
| 1910.9318 | 1910.9291 | −.0027 | −1 | 485 | 500 | RPCFSALEVDETY |
| | | | | | | VPK |

| | |
|---|---|
| Chain A, Human Serum Albumin Complexed With | gi\|122920512 |
| Myristate And Aspirin | |

[0194] Peptide Information

| | | | | Start | End | |
|---|---|---|---|---|---|---|
| Calc. Mass | Obsrv. Mass | ±da | ±ppm | Seq. | Seq. | Sequence |
| 875.5098 | 875.5068 | −.003 | −3 | 219 | 225 | LSQRFPK |
| 927.4934 | 927.4922 | −.0012 | −1 | 138 | 144 | YLYEIAR |
| 960.5625 | 960.5635 | .001 | 1 | 403 | 410 | FQNALLVR |
| 1141.694 | 1141.5903 | −.1037 | −91 | 574 | 585 | KLVAASQAALGL |
| 1149.615 | 1149.6154 | .0004 | 0 | 42 | 51 | LVNEVTEFAK |
| 1311.7419 | 1311.6891 | −.0528 | −40 | 338 | 348 | HPDYSVVLLLR |
| 1358.6298 | 1358.6514 | .0216 | 16 | 546 | 557 | AVMDDFAAFVEK |
| 1467.8431 | 1467.8401 | −.003 | −2 | 337 | 348 | RHPDYSVVLLLR |
| 1511.8429 | 1511.7273 | −.1156 | −76 | 415 | 428 | VPQVSTPTLVEVSR |
| 1546.7968 | 1546.7734 | −.0234 | −15 | 275 | 286 | LKECCEKPLLEK |
| 1639.9379 | 1639.8716 | −.0663 | −40 | 414 | 428 | KVPQVSTPTLVEV |
| | | | | | | SR |
| 1684.821 | 1684.8859 | .0649 | 39 | 263 | 276 | YICENQDSISSKLK |
| 1684.821 | 1684.8859 | .0649 | 39 | 263 | 276 | YICENQDSISSKLK |
| 1910.9318 | 1910.9291 | −.0027 | −1 | 485 | 500 | RPCFSALEVDETY |
| | | | | | | VPK |

| | |
|---|---|
| Chain A, Human Serum Albumin | gi\|311771978 |
| Complexed With | |
| Dansyl-L-Asparagine And Myristic Acid | |

[0195] Protein Group

| | |
|---|---|
| Chain A, Human Serum Albumin | gi\|311771979 |
| Complexed With | |
| Dansyl-L-Arginine And Myristic Acid | |
| Chain A, Human Serum Albumin | gi\|311771969 |
| Complexed With | |
| Dansyl-L-Glutamate And Myristic Acid | |
| Chain A, Human Serum Albumin | gi\|78101694 |
| Complexed With | |
| Myristate And Azapropazone | |
| Chain A, Human Serum Albumin | gi\|78101695 |
| Complexed With | |
| Myristate, Azapropazone And | |
| Indomethacin | |
| Chain A, Human Serum Albumin | gi\|78101701 |
| Complexed With | |
| Myristate, Phenylbutazone And | |
| Indomethacin | |

[0196] Peptide Information

| | Obsrv. | | | Start | | |
|---|---|---|---|---|---|---|
| Calc. Mass | Mass | ±da | ±ppm | Seq. | End Seq. | Sequence |
| 875.5098 | 875.5068 | −.003 | −3 | 219 | 225 | LSQRFPK |
| 927.4934 | 927.4922 | −.0012 | −1 | 138 | 144 | YLYEIAR |
| 960.5625 | 960.5635 | .001 | 1 | 403 | 410 | FQNALLVR |
| 1141.694 | 1141.5903 | −.1037 | −91 | 574 | 585 | KLVAASQAALGL |
| 1149.615 | 1149.6154 | .0004 | 0 | 42 | 51 | LVNEVTEFAK |
| 1311.7419 | 1311.6891 | −.0528 | −40 | 338 | 348 | HPDYSVVLLLR |
| 1358.6298 | 1358.6514 | .0216 | 16 | 546 | 557 | AVMDDFAAFVEK |
| 1467.8431 | 1467.8401 | −.003 | −2 | 337 | 348 | RHPDYSVVLLLR |
| 1511.8429 | 1511.7273 | −.1156 | −76 | 415 | 428 | VPQVSTPTLVEVSR |
| 1546.7968 | 1546.7734 | −.0234 | −15 | 275 | 286 | LKECCEKPLLEK |
| 1639.9379 | 1639.8716 | −.0663 | −40 | 414 | 428 | KVPQVSTPTLVEV |
| | | | | | | SR |
| 1684.821 | 1684.8859 | .0649 | 39 | 263 | 276 | YICENQDSISSKLK |
| 1684.821 | 1684.8859 | .0649 | 39 | 263 | 276 | YICENQDSISSKLK |
| 1910.9318 | 1910.9291 | −.0027 | −1 | 485 | 500 | RPCFSALEVDETY |
| | | | | | | VPK |

| | |
|---|---|
| Chain A, Human Serum Albumin Complexed With | gi\|311771982 |
| Dansyl-L-Norvaline | |

[0197] Protein Group

| | |
|---|---|
| Chain A, Human Serum Albumin Complexed With | gi\|311771976 |
| Dansyl-L-Asparagine | |
| Chain A, Human Serum Albumin Complexed With | gi\|311771980 |
| Dansyl-L-Phenylalanine | |
| Chain A, Human Serum Albumin Complexed With | gi\|311771974 |
| Dansyl-L-Sarcosine | |
| Chain A, Human Serum Albumin Complexed With | gi\|330689346 |
| Iophenoxic Acid | |
| Chain A, Human Serum Albumin In Complex With | gi\|310689763 |
| Compound 1 | |
| Chain A, Human Serum Albumin In Complex With | gi\|310689765 |
| Compound 2 | |
| Chain A, Human Serum Albumin In Complex With | gi\|310689767 |
| Compound 3 | |
| Chain A, Human Serum Albumin With Bound Sulfate | gi\|294979706 |
| Chain B, Human Serum Albumin Complexed With | gi\|311771977 |
| Dansyl-L-Asparagine | |
| Chain B, Human Serum Albumin Complexed With | gi\|311771983 |
| Dansyl-L-Norvaline | |
| Chain B, Human Serum Albumin Complexed With | gi\|311771981 |
| Dansyl-L-Phenylalanine | |
| Chain B, Human Serum Albumin Complexed With | gi\|311771975 |
| Dansyl-L-Sarcosine | |
| Chain B, Human Serum Albumin Complexed With | gi\|330689347 |
| Iophenoxic Acid | |
| Chain B, Human Serum Albumin In Complex With | gi\|310689764 |
| Compound 1 | |
| Chain B, Human Serum Albumin In Complex With | gi\|310689766 |
| Compound 2 | |
| Chain B, Human Serum Albumin In Complex With | gi\|310689768 |
| Compound 3 | |
| Chain B, Human Serum Albumin With Bound Sulfate | gi\|294979707 |
| unnamed protein product [Homo sapiens] | gi\|317439073 |
| unnamed protein product [Homo sapiens] | gi\|311843689 |
| unnamed protein product [Homo sapiens] | gi\|311080790 |

[0198] Peptide Information

| | | | | Start | End | |
|---|---|---|---|---|---|---|
| Calc. Mass | Obsrv. Mass | ±da | ±ppm | Seq. | Seq. | Sequence |
| 875.5098 | 875.5068 | −.003 | −3 | 219 | 225 | LSQRFPK |
| 927.4934 | 927.4922 | −.0012 | −1 | 138 | 144 | YLYEIAR |
| 960.5625 | 960.5635 | .001 | 1 | 403 | 410 | FQNALLVR |
| 1141.694 | 1141.5903 | −.1037 | −91 | 574 | 585 | KLVAASQAALGL |
| 1149.615 | 1149.6154 | .0004 | 0 | 42 | 51 | LVNEVTEFAK |
| 1311.7419 | 1311.6891 | −.0528 | −40 | 338 | 348 | HPDYSVVLLLR |
| 1358.6298 | 1358.6514 | .0216 | 16 | 546 | 557 | AVMDDFAAFVEK |
| 1467.8431 | 1467.8401 | −.003 | −2 | 337 | 348 | RHPDYSVVLLLR |
| 1511.8429 | 1511.7273 | −.1156 | −76 | 415 | 428 | VPQVSTPTLVEVSR |
| 1546.7968 | 1546.7734 | −.0234 | −15 | 275 | 286 | LKECCEKPLLEK |
| 1639.9379 | 1639.8716 | −.0663 | −40 | 414 | 428 | KVPQVSTPTLVEV |
| | | | | | | SR |
| 1684.821 | 1684.8859 | .0649 | 39 | 263 | 276 | YICENQDSISSKLK |
| 1684.821 | 1684.8859 | .0649 | 39 | 263 | 276 | YICENQDSISSKLK |
| 1910.9318 | 1910.9291 | −.0027 | −1 | 485 | 500 | RPCFSALEVDETY |
| | | | | | | VPK |

| | |
|---|---|
| importin 4 variant [Homo sapiens] | gi\|62088532 |

[0199] Peptide Information

| Calc. | | | | | | |
|---|---|---|---|---|---|---|
| Mass | Obsrv. | ±da | ±ppm | Star Seq. | End Seq. | Sequence |
| 1220.5867 | 1220.6044 | .0177 | 15 | 97 | 108 | SSSSPTQLGNSR |

| | |
|---|---|
| NEDD4 family-interacting protein 2 isoform | gi\|2390467 |
| sapiens] | |

[0200] Protein Group

| | |
|---|---|
| KIAA1165 protein [Homo sapiens] | gi\|6330171 |
| NDFIP2 protein [Homo sapiens] | gi\|19913452 |
| NDFIP2 protein [Homo sapiens] | gi\|18314412 |
| NEDD4 family-interacting protein 2 isoform 2 [Homo | gi\|239046743 |
| sapiens] | |
| Nedd4 family interacting protein 2 [Homo sapiens] | gi\|119601005 |
| Nedd4 family interacting protein 2 [Homo sapiens] | gi\|55661722 |
| Nedd4 family interacting protein 2 [Homo sapiens] | gi\|55663185 |
| RecName: Full = NEDD4 family-interacting protein 2; | gi\|73921209 |
| AltName: Full = NEDD4 WW domain-binding protein | |
| 5A; | |
| AltName: Full = Putative MAPK-activating protein | |
| PM04/PM05/PM06/PM07; AltName: Full = Putative | |
| NF-kappa-B-activating protein 413 | |
| putative MAPK activating protein [Homo sapiens] | gi\|31455517 |
| putative MAPK activating protein [Homo sapiens] | gi\|31455511 |
| putative MAPK activating protein [Homo sapiens] | gi\|31455515 |
| putative MAPK activating protein [Homo sapiens] | gi\|31455513 |
| putative NFkB activating protein [Homo sapiens] | gi\|31455493 |
| unnamed protein product [Homo sapiens] | gi\|194386240 |
| unnamed protein product [Homo sapiens] | gi\|40032123 |
| unnamed protein product [Homo sapiens] | gi\|194378394 |
| unnamed protein product [Homo sapiens] | gi\|7023163 |

[0201] Peptide Information

| | Obsrv. | | | | | |
|---|---|---|---|---|---|---|
| Calc. Mass | Mass | ±da | ±ppm | Start Seq. | End Seq. | Sequence |
| 1220.5146 | 1220.6044 | .0898 | 74 | 319 | 329 | NMSESMAAAHR |

| | |
|---|---|
| Chain E, Crystal Structure Of Murine Thrombin | gi\|251837019 |
| Mutant W215aE217A IN Complex With The | |
| Extracellular Fragment Of Human Par1 | |

[0202] Protein Group

| | |
|---|---|
| Chain 2, Crystal Structure Of Human Alpha-Thrombin | gi\|4699691 |
| Inhibited With Sel2770. | |
| Chain 2, Human Alpha Thrombin Inhibited By Rppgf | gi\|28949036 |
| And Hirugen | |
| Chain 2, Selective Non Electrophilic Thrombin | gi\|10835495 |
| Inhibitors | |
| With Cyclohexyl Moieties. | |
| Chain 2, Selective Non Electrophilic Thrombin | gi\|10835492 |
| Inhibitors | |
| With Cyclohexyl Moieties. | |
| Chain 2, Selective Non-Electrophilic Thrombin | gi\|11514706 |
| Inhibitors | |
| Chain A, Crystal Structue Of Thrombin In Complex | |
| With | |
| A Potent P1 Heterocycle-Aryl Based Inhibitor | gi\|51247369 |
| Chain A, Crystal Structure Of Human Alpha-Thrombin | gi\|14278416 |
| Complexed With Bch-10556 And Exosite-Directed | |
| Peptide | |
| Chain A, Crystal Structure Of Human | gi\|11514051 |
| Alpha-ThrombinRwj-51438 Complex At 1.7 A | |
| Chain A, Crystal Structure Of Human Prethrombin-1 | gi\|311772208 |
| Chain A, Crystal Structure Of The Anticoagulant Slow | gi\|27065656 |
| Form Of Thrombin | |
| Chain A, Crystal Structure Of Thrombin In Complex | gi\|20150575 |
| With A Novel Bicyclic Lactam Inhibitor | |
| Chain A, Crystal Structure Of Thrombin In Complex | gi\|49259291 |
| With Compound 1 | |
| Chain A, Crystal Structure Of Thrombin In Complex | gi\|49259293 |
| With Compound 14b | |
| Chain A, Crystal Structure Of Thrombin In Complex | gi\|170292482 |
| With Inhibitor 15 | |
| Chain A, Design Of P1′ And P3′ Residues Of Trivalent | gi\|7766841 |
| Thrombin Inhibitors And Their Crystal Structures | |
| Chain A, Design Of P1′ And P3′ Residues Of Trivalent | gi\|7766843 |
| Thrombin Inhibitors And Their Crystal Structures | |
| Chain A, Nonbasic Thrombin Inhibitor Complex | gi\|67464458 |
| Chain A, Staphylocoagulase-Prethrombin-2 Complex | gi\|37927039 |
| Chain A, Structure Of Thrombin Complexed With | gi\|11514212 |
| Selective Non-Electophilic Inhibitors Having | |
| Cyclohexyl | |
| Moieties At P1 | |
| Chain A, Structure Of Thrombin Complexed With | gi\|11514286 |
| Selective Non-Electrophilic Inhibitors Having | |
| Cyclohexyl Moieties At P1 | |
| Chain A, Thrombin And P2 Pyridine N-Oxide Inhibitor | gi\|67464365 |
| Complex Structure | |
| Chain A, Thrombin In Complex With An Azafluorenyl | gi\|71042452 |
| Inhibitor 23b | |
| Chain A, Thrombin In Complex With An | gi\|78101061 |
| Oxazolopyridine Inhibitor 2 | |
| Chain A, Thrombin In Complex With An | gi\|78101058 |
| Oxazolopyridine Inhibitor | |
| 21 | |
| Chain A, Thrombin In Complex With | gi\|118137345 |
| Inhibitor | |
| Chain A, Thrombin In Complex With Selective | gi\|34810004 |
| Macrocyclic Inhibitor | |
| Chain A, Thrombin In Complex With Selective | gi\|34810002 |
| Macrocyclic Inhibitor At | |
| 1.8a | |
| Chain B, 1.9 Angstrom Crytal Structure Of Wild-Type | gi\|83753983 |
| Human Thrombin In The Sodium Free | |
| State | |
| Chain B, 2-(2-Chloro-6-Fluorophenyl)acetamides As | gi\|197304957 |
| Potent Thrombin Inhibitors | |
| Chain B, 2.1 Angstrom Structure Of A Nonproductive | gi\|116666780 |
| Complex Between Antithrombin, Synthetic Heparin | |
| Mimetic Sr123781 And Two S195a Thrombin | |
| Molecules | |
| Chain B, 2.5a Structure Of Anticoagulant Thrombin | gi\|48425307 |
| Variant | |
| E217k | |
| Chain B, Active Site Thrombin Inhibitors | gi\|157880622 |
| Chain B, Active Site Thrombin Inhibitors | |
| Chain B, Active Site Thrombin Inhibitors | gi\|60593850 |
| Chain B, Crystal Structure Of Human Alpha Thrombin | gi\|6435757 |
| In | |
| Complex With 5-Amidinoindole-4-Benzylpiperidine | |
| Inhibitor | |
| Chain B, Crystal Structure Of Human Alpha Thrombin | gi\|10835400 |
| In | |
| Complex With Benzo[b]thiophene | |
| Inhibitor 1 | |
| Chain B, Crystal Structure Of Human Alpha Thrombin | gi\|10835397 |
| In | |
| Complex With Benzo[b]thiophene | |
| Inhibitor 2 | |
| Chain B, Crystal Structure Of Human Alpha Thrombin | gi\|10835391 |
| In | |
| Complex With Benzothiophene Inhibitor 4 | |
| Chain B, Crystal Structure Of Human Aplha-Thrombin | gi\|10835394 |
| In Complex With Benzo[b]thiophene Inhibitor 3 | |
| Chain B, Crystal Structure Of Human Thrombin Mutant | gi\|261825076 |
| N143p In E Form | |
| Chain B, Crystal Structure Of Human Thrombin Mutant | gi\|261825074 |
| N143p In E:na+ Form | |
| Chain B, Crystal Structure Of Human Thrombin Mutant | gi\|291191316 |
| S195a In Complex Extracellular Fragment Of Human | |
| Par1 | |
| Chain B, Crystal Structure Of Na-Free Thrombin In | gi\|256032633 |
| Complex With Thrombomodulin | |
| Chain B, Crystal Structure Of Native S195a Thrombin | gi\|15825721 |
| With An Unoccupied Active Site | |
| Chain B, Crystal Structure Of | gi\|307776409 |
| Prethombin-2FRAGMENT-2 Complex | |
| Chain B, Crystal Structure Of The Anticoagulant Slow | gi\|49258988 |
| Form Of Thrombin | |
| Chain B, Crystal Structure Of The Anticoagulant Slow | gi\|27065657 |
| Form Of Thrombin | |
| Chain B, Crystal Structure Of The Anticoagulant | gi\|51247717 |
| Thrombin Mutant W215aE217A BOUND TO PPACK | |
| Chain B, Crystal Structure Of The Complex Between | gi\|99031771 |
| Thrombin And The Central “e” Region Of Fibrin | |
| Chain B, Crystal Structure Of The Complex Of Platelet | gi\|34811264 |
| Receptor Gpib-Alpha And Human Alpha-Thrombin | |
| Chain B, Crystal Structure Of The Potent | gi\|51247713 |
| Anticoagulant | |
| Thrombin Mutant W215aE217A IN FREE FORM | |
| Chain B, Crystal Structure Of The Procoagulant Fast | gi\|49258984 |
| Form Of Thrombin | |
| Chain B, Crystal Structure Of The Slow Form Of | gi\|116667325 |
| Thrombin In A Self-Inhibited | |
| Conformation | |
| Chain B, Crystal Structure Of The Slow Form Of | gi\|163931173 |
| Thrombin In A Self_inhibited | |
| Conformation | |
| Chain B, Crystal Structure Of The Thrombin Mutant | gi\|66360194 |
| D221aD222K | |
| Chain B, Crystal Structure Of The Thrombin Mutant | gi\|67464370 |
| G193a Bound To Ppack | |
| Chain B, Crystal Structure Of The Thrombin Mutant | gi\|67464373 |
| G193p Bound To Ppack | |
| Chain B, Crystal Structure Of The W215aE217A | gi\|251836913 |
| MUTANT OF HUMAN Thrombin (Space Group | |
| P2(1)2(1)2(1)) | |
| Chain B, Crystal Structure Of Thrombin Bound To | gi\|56967145 |
| Heparin | |
| Chain B, Crystal Structure Of Thrombin Bound To The | gi\|164414856 |
| Extracellular Fragment Of Par1 | |
| Chain B, Crystal Structure Of Thrombin In Complex | gi\|116667879 |
| With Fibrinogen Gamma′ Peptide | |
| Chain B, Crystal Structure Of Thrombin In Complex | gi\|237823757 |
| With Inhibitor | |
| Chain B, Crystal Structure Of Thrombin In Complex | gi\|47168355 |
| With L-378,622 | |
| Chain B, Cyanofluorophenylacetamides As Orally | gi\|223673888 |
| Efficacious Thrombin Inhibitors | |
| Chain B, Fast Form Of Thrombin Mutant R(77a)a | gi\|49258977 |
| Bound To Ppack | |
| Chain B, Human Thrombin Chimera With Human | gi\|146387601 |
| Residues 184a, 186, 186a, 186b, 186c And 222 | |
| Replaced By Murine Thrombin | |
| Equivalents. | |
| Chain B, Human Thrombin Mutant C191a-C220a In | gi\|152149319 |
| Complex With The Inhibitor Ppack | |
| Chain B, Inhibitor-Free Human Thrombin Mutant | gi\|152149317 |
| C191a- | |
| C220a | |
| Chain B, Novel Covalent Active Site Thrombin | gi\|9257032 |
| Inhibitors | |
| Chain B, Novel Covalent Active Site Thrombin | gi\|9257029 |
| Inhibitors | |
| Chain B, Novel Covalent Active Site Thrombin | gi\|8569363 |
| Inhibitors | |
| Chain B, Novel Covalent Active Site Thrombin | gi\|9257022 |
| Inhibitors | |
| Chain B, Novel Covalent Thrombin Inhibitor From | gi\|3891598 |
| Plant | |
| Extract | |
| Chain B, Ser195ala Mutant Of Human Thrombin | gi\|6980506 |
| Complexed With Fibrinopeptide A (7-16) | |
| Chain B, Slow Form Of Thrombin Bound With Ppack | gi\|49258995 |
| Chain B, Staphylocoagulase-Thrombin Complex | gi\|37927032 |
| Chain B, Structure Of Human Alpha-Thrombin Y225f | gi\|4699868 |
| Mutant Bound To D-Phe-Pro-Arg-Chloromethylketone | |
| Chain B, Structure Of Human Alpha-Thrombin Y225i | gi\|6980889 |
| Mutant Bound To D-Phe-Pro-Arg-Chloromethylketone | |
| Chain B, Structure Of Human Alpha-Thrombin Y225p | gi\|4699865 |
| Mutant Bound To D-Phe-Pro-Arg-Chloromethylketone | |
| Chain B, Structure Of Human Thrombin With Residues | gi\|332639879 |
| 145-150 Of Murine Thrombin. | |
| Chain B, Structure Of Thrombin Bound To The | gi\|169404722 |
| Inhibitor | |
| Fm19 | |
| Chain B, Structure Of Thrombin In 400 Mm Potassium | gi\|73536044 |
| Chloride | |
| Chain B, Structure Of Thrombin Mutant Delta(146- | gi\|238828222 |
| 149e) | |
| In The Free For | |
| Chain B, Thrombin In Complex With | gi\|185177551 |
| Inhibitor | |
| Chain B, Thrombin In Complex With Natural Product | gi\|56965950 |
| Inhibitor Oscillarin | |
| Chain B, Thrombin Inhibitor Complex | gi\|18655494 |
| Chain B, Thrombin Inhibitor Complex | gi\|16975148 |
| Chain B, Thrombin Inhibitor Complex | gi\|16975151 |
| Chain B, Thrombin Inhibitor Complex | |
| Chain B, Thrombin Inhibitor Complex | gi\|18655491 |
| Chain B, Thrombin Inhibitor With A Rigid Tripeptidyl | gi\|4929904 |
| Aldehydes | |
| Chain B, Thrombin | gi\|112490129 |
| Inhibitors | |
| Chain B, Thrombin | gi\|112490124 |
| Inhibitors | |
| Chain B, Thrombin | gi\|112490120 |
| Inhibitors | |
| Chain B, Thrombin | gi\|112490111 |
| Inhibitors | |
| Chain B, Thrombin | gi\|112490107 |
| Inhibitors | |
| Chain B, Thrombin | gi\|112490115 |
| Inhibitors | |
| Chain B, Thrombin Inhibitors With Rigid Tripeptidyl | gi\|4929962 |
| Aldehydes | |
| Chain B, Thrombin Inhibitors With Rigid Tripeptidyl | gi\|4929910 |
| Aldehydes | |
| Chain B, Thrombin-Hirugen Binary Complex At 1.26a | gi\|158430867 |
| Resolution | |
| Chain B, Thrombin-Hirugen-Gw420128 Ternary | gi\|158430873 |
| Complex At 1.39a | |
| Resolution | |
| Chain B, Thrombin-Hirugen-Gw473178 Ternary | gi\|158430870 |
| Complex At 1.32a | |
| Resolution | |
| Chain B, Thrombin-Hirugen-L405,426 | gi\|47168361 |
| Chain B, Thrombin-Hirugen_I-378,650 | gi\|47168358 |
| Chain B, X-Ray Structure Of The Complex Of Human | gi\|3891536 |
| Alpha Thrombin With The Inhibitor Sdz 229-357 | |
| Chain C, Antithrombin-Anhydrothrombin-Heparin | gi\|52695557 |
| Ternary Complex Structure | |
| Chain C, Crystal Structure Of The Complex Of Platelet | gi\|34811275 |
| Receptor Gpib-Alpha And Alpha-Thrombin At 2.6a | |
| Chain C, Crystallographic Structure Of Human | gi\|809212 |
| Gamma-Thrombin | |
| Chain D, 1.9 Angstrom Crytal Structure Of Wild-Type | gi\|83753985 |
| Human Thrombin In The Sodium Free | |
| State | |
| Chain D, 2.1 Angstrom Structure Of A Nonproductive | gi\|116666782 |
| Complex Between Antithrombin, Synthetic Heparin | |
| Mimetic Sr123781 And Two S195a Thrombin | |
| Molecules | |
| Chain D, 2.5a Structure Of Anticoagulant Thrombin | gi\|48425309 |
| Variant | |
| E217k | |
| Chain D, Crystal Structure Of Na-Free Thrombin In | gi\|256032635 |
| Complex With Thrombomodulin | |
| Chain D, Crystal Structure Of Native S195a Thrombin | gi\|15825723 |
| With An Unoccupied Active Site | |
| Chain D, Crystal Structure Of The Potent | gi\|51247715 |
| Anticoagulant | |
| Thrombin Mutant W215aE217A IN FREE FORM | |
| Chain D, Crystal Structure Of Thrombin Bound To | gi\|56967147 |
| Heparin | |
| Chain D, Crystal Structure Of Thrombin In Complex | gi\|116667881 |
| With Fibrinogen Gamma′ Peptide | |
| Chain D, Human Thrombin Hirugen Inhibitor Complex. | gi\|149242370 |
| Chain D, Human Thrombin Hirugen Inhibitor Complex. | gi\|149242365 |
| Chain D, Human Thrombin Hirugen Inhibitor Complex. | gi\|149242359 |
| Chain D, Novel Covalent Thrombin Inhibitor From | gi\|3891600 |
| Plant | |
| Extract | |
| Chain D, Staphylocoagulase-Prethrombin-2 Complex | gi\|37927041 |
| Chain D, Structure Of Thrombin In 400 Mm Potassium | gi\|73536046 |
| Chloride | |
| Chain E, Crystal Structure Of Human Thrombin Mutant | gi\|291191319 |
| S195a In Complex Extracellular Fragment Of Human | |
| Par1 | |
| Chain E, Crystal Structure Of Human Thrombin Mutant | gi\|251837025 |
| W215aE217A IN Complex With The Extracellular | |
| Fragment Of Human Par1 | |
| Chain E, Crystal Structure Of The Anticoagulant Slow | gi\|49258990 |
| Form Of Thrombin | |
| Chain E, Crystal Structure Of The Complex Between | gi\|99031773 |
| Thrombin And The Central “e” Region Of Fibrin | |
| Chain E, Crystal Structure Of The Procoagulant Fast | gi\|49258986 |
| Form Of Thrombin | |
| Chain E, Crystal Structure Of Thrombin Bound To The | gi\|164414859 |
| Extracellular Fragment Of Par1 | |
| Chain E, Fast Form Of Thrombin Mutant R(77a)a | gi\|49258979 |
| Bound To Ppack | |
| Chain E, Slow Form Of Thrombin Bound With Ppack | gi\|49258997 |
| Chain E, The Isomorphous Structures Of | gi\|809450 |
| Prethrombin2, | |
| Hirugen-And Ppack-Thrombin: Changes | |
| Accompanying | |
| Activation And Exosite Binding To | |
| Thrombin | |
| Chain F, Crystal Structure Of Na-Free Thrombin In | gi\|256032637 |
| Complex With Thrombomodulin | |
| Chain F, Crystal Structure Of Native S195a Thrombin | gi\|15825725 |
| With An Unoccupied Active Site | |
| Chain F, Crystal Structure Of Thrombin Bound To | gi\|56967149 |
| Heparin | |
| Chain F, Staphylocoagulase-Thrombin Complex | gi\|37927035 |
| Chain H, 1.6 A Structure Of The Pci-Thrombin-Heparin | gi\|185177830 |
| Complex | |
| Chain H, 2.5a Crystal Structure Of The | gi\|52695710 |
| Antithrombin-Thrombin-Heparin Ternary Complex | |
| Chain H, A Novel Serine Protease Inhibition Motif | gi\|157877660 |
| Involving A Multi-Centered Short Hydrogen Bonding | |
| Network At The Active Site | |
| Chain H, A Novel Serine Protease Inhibition Motif | gi\|157877655 |
| Involving A Multi-Centered Short Hydrogen Bonding | |
| Network At The Active Site | |
| Chain H, A Novel Serine Protease Inhibition Motif | gi\|18655740 |
| Involving A Multi-Centered Short Hydrogen Bonding | |
| Network At The Active Site | |
| Chain H, A Novel Serine Protease Inhibition Motif | gi\|18655743 |
| Involving A Multi-Centered Short Hydrogen Bonding | |
| Network At The Active Site | |
| Chain H, Active Site Mimetic Inhibition Of Thrombin | gi\|999824 |
| Chain H, Alpha-Thrombin (Hirugen) Complexed With | gi\|1943459 |
| Na-(N,N-Dimethylcarbamoyl)-Alpha-Azalysine | |
| Chain H, Alpha-Thrombin Complex With Sulfated | gi\|109156904 |
| Hirudin (Residues 54-65) And L-Arginine Template | |
| Inhibitor Cs107 | |
| Chain H, Alpha-Thrombin Complexed With Hirugen | gi\|1942044 |
| Chain H, Alpha-Thrombin Complexed With Hirugen | gi\|3891955 |
| And | |
| Proflavin | |
| Chain H, Bisphenylic Thrombin Inhibitors | gi\|237823760 |
| Chain H, Bisphenylic Thrombin Inhibitors | gi\|226887660 |
| Chain H, Bovine Thrombin--Bm51.1011 Complex | gi\|2781295 |
| Chain H, Changes In Interactions In Complexes Of | gi\|640438 |
| Hirudin Derivatives And Human Alpha-Thrombin Due | |
| To Different Crystal Forms | |
| Chain H, Changes In Interactions In Complexes Of | gi\|640434 |
| Hirudin Derivatives And Human Alpha-Thrombin Due | |
| To Different Crystal Forms | |
| Chain H, Complex Of A Divalent Inhibitor With | gi\|1633538 |
| Thrombin | |
| Chain H, Complex Of Human Alpha-Thrombin With A | gi\|1421172 |
| 15mer Oligonucleotide Ggttggtgtggttgg (Based On | |
| Nmr | |
| Model Of | |
| Dna | |
| Chain H, Complex Of Human Alpha-Thrombin With A | gi\|1421184 |
| 15mer Oligonucleotide Ggttggtgtggttgg (Based On | |
| X-Ray Model Of Dna) | |
| Chain H, Complex Of Human Alpha-Thrombin With | gi\|3319062 |
| The | |
| Bifunctional Boronate Inhibitor Borolog1 | |
| Chain H, Complex Of Human Alpha-Thrombin With | gi\|3319065 |
| The | |
| Bifunctional Boronate Inhibitor Borolog2 | |
| Chain H, Complex Of Recombinant Human Thrombin | gi\|33357811 |
| With A Designed Fluorinated Inhibitor | |
| Chain H, Complex Of Recombinant Human Thrombin | gi\|157881486 |
| With A Designed Inhibitor | |
| Chain H, Complex Of Thrombin With And Inhibitor | gi\|2624617 |
| Containing A Novel P1 Moiety | |
| Chain H, Complex Of Thrombin With Designed | gi\|71041796 |
| Inhibitor | |
| 7165 | |
| Chain H, Complex Structure Of Human Thrombin With | gi\|18655576 |
| N-Methyl-Arginine Inhibitor | |
| Chain H, Crystal Structure Analysis Of A Novel | gi\|62738009 |
| Oxyguanidine Bound To Thrombin | |
| Chain H, Crystal Structure Analysis Of A Novel | gi\|62738006 |
| Oxyguanidine Bound To Thrombin | |
| Chain H, Crystal Structure Of An Rna Aptamer Bound | gi\|212374978 |
| To Human Thrombin | |
| Chain H, Crystal Structure Of Human Alpha-Thrombin | gi\|1421284 |
| Complexed With Hirugen And | |
| P-Amidinophenylpyruvate) At 1.6 Angstroms | |
| Resolution | |
| Chain H, Crystal Structure Of Human Alpha-Thrombin | gi\|149241911 |
| In Complex With Suramin | |
| Chain H, Crystal Structure Of Human Alpha-Thrombin | gi\|7246027 |
| Inhibited With Sel2711. | |
| Chain H, Crystal Structure Of Sulfo-Hirudin | gi\|159795118 |
| Complexed | |
| To Thrombin | |
| Chain H, Crystal Structure Of The Complex Of Human | gi\|494209 |
| Alpha-Thrombin And Non-Hydrolyzable Bifunctional | |
| Inhibitors, Hirutonin-2 And Hirutonin-6 | |
| Chain H, Crystal Structure Of The Complex Of Human | gi\|494206 |
| Alpha-Thrombin And Non-Hydrolyzable Bifunctional | |
| Inhibitors, Hirutonin-2 And Hirutonin-6 | |
| Chain H, Crystal Structure Of The Heparin Cofactor | gi\|23200175 |
| li-S195a Thrombin | |
| Complex | |
| Chain H, Crystal Structure Of Thrombin Bound To | gi\|56967151 |
| Heparin | |
| Chain H, Crystal Structure Of Thrombin Complexed | gi\|6435561 |
| With An Guanidine-Mimetic Inhibitor | |
| Chain H, Crystal Structures Of Thrombin With | gi\|3212360 |
| Thiazole-Containing Inhibitors: Probes Of | |
| The S1′ Binding Site | |
| Chain H, Crystallographic Analysis At 3.0-Angstroms | gi\|493995 |
| Resolution Of The Binding To Human Thrombin Of | |
| Four | |
| Active Site-Directed Inhibitors | |
| Chain H, Crystallographic Analysis At 3.0-Angstroms | gi\|493989 |
| Resolution Of The Binding To Human Thrombin Of | |
| Four | |
| Active Site-Directed Inhibitors | |
| Chain H, Crystallographic Analysis At 3.0-Angstroms | gi\|493992 |
| Resolution Of The Binding To Human Thrombin Of | |
| Four | |
| Active Site-Directed Inhibitors | |
| Chain H, Crystallographic Analysis At 3.0-Angstroms | gi\|493986 |
| Resolution Of The Binding To Human Thrombin Of | |
| Four | |
| Active Site-Directed Inhibitors | |
| Chain H, Crystallographic Structures Of Thrombin | gi\|576213 |
| Complexed With Thrombin Receptor | |
| Peptides: Existence Of Expected And | |
| Novel Binding Modes | |
| Chain H, Crystallographic Structures Of Thrombin | gi\|576216 |
| Complexed With Thrombin Receptor | |
| Peptides: Existence Of Expected And | |
| Novel Binding Modes | |
| Chain H, Crystallographic Structures Of Thrombin | gi\|576210 |
| Complexed With Thrombin Receptor | |
| Peptides: Existence Of Expected And | |
| Novel Binding Modes | |
| Chain H, Crystallographic Structures Of Thrombin | gi\|576204 |
| Complexed With Thrombin Receptor | |
| Peptides: Existence Of Expected And | |
| Novel Binding Modes | |
| Chain H, Crystallographic Structures Of Thrombin | gi\|576220 |
| Complexed With Thrombin Receptor | |
| Peptides: Existence Of Expected And | |
| Novel Binding Modes | |
| Chain H, Crystallographic Structures Of Thrombin | gi\|576207 |
| Complexed With Thrombin Receptor | |
| Peptides: Existence Of Expected And | |
| Novel Binding Modes | |
| Chain H, D-Phe-Pro-Arg-Type Thrombin Inhibitor | gi\|38492568 |
| Chain H, Design And Discovery Of Novel, Potent | gi\|118137398 |
| Thrombin Inhibitors With A Solubilizing Cationic | |
| P1-P2-Linker | |
| Chain H, Design And Discovery Of Novel, Potent | gi\|118137395 |
| Thrombin Inhibitors With A Solubilizing Cationic | |
| P1-P2-Linker | |
| Chain H, Design And Discovery Of Novel, Potent | gi\|118137392 |
| Thrombin Inhibitors With A Solubilizing Cationic | |
| P1-P2-Linker | |
| Chain H, Design Of Weakly Basic Thrombin Inhibitors | gi\|34810220 |
| Incorporating Novel P1 Binding Functions: Molecular | |
| And X-Ray Crystallographic Studies. | |
| Chain H, Dissecting And Designing Inhibitor Selectivity | gi\|55669528 |
| Determinants At The S1 Site Using An Artificial Ala190 | |
| Protease (Ala190 Upa) | |
| Chain H, Elaborate Manifold Of Short Hydrogen Bond | gi\|31615744 |
| Arrays Mediating Binding Of Active Site-Directed | |
| Serine | |
| Protease Inhibitors | |
| Chain H, Exploring Thrombin S1 Pocket | gi\|211939077 |
| Chain H, Exploring Thrombin S1 Pocket | gi\|210060871 |
| Chain H, Exploring Thrombin S1 Pocket | gi\|210060874 |
| Chain H, Exploring Thrombin S1-Pocket | gi\|218681562 |
| Chain H, Exploring Thrombin S3 Pocket | gi\|223365748 |
| Chain H, Exploring Thrombin S3 Pocket | gi\|220702239 |
| Chain H, Exploring Thrombin S3 Pocket | gi\|220702242 |
| Chain H, Exploring Thrombin S3 Pocket | gi\|223365743 |
| Chain H, Exploring Thrombin S3 Pocket | |
| Chain H, Exploring Thrombin S3 Pocket | gi\|223365740 |
| Chain H, Exploring Thrombin S3 Pocket | gi\|221046516 |
| Chain H, Hirunorms Are True Hirudin Mimetics. The | gi\|2914466 |
| Crystal Structure Of Human Alpha-Thrombin:hirunorm | |
| V Complex | |
| Chain H, Human Alpha-Thrombin Complexed With A | gi\|1065046 |
| Peptidyl Pyridinium Methyl Ketone Containing Bivalent | |
| Inhibitor | |
| Chain H, Human Alpha-Thrombin Complexed With | gi\|1943483 |
| Ac-(D)phe-Pro-Boroornithine-Oh | |
| Chain H, Human Alpha-Thrombin Complexed With | gi\|1943480 |
| Ac-(D)phe-Pro-Boro-Homolys-Oh | |
| Chain H, Human Alpha-Thrombin Complexed With | gi\|1943477 |
| Ac-(D)phe-Pro-Boro-N-Butyl-Amidino-Glycine-Oh | |
| Chain H, Human Alpha-Thrombin Complexed With | gi\|1943530 |
| Ac-(D)phe-Pro-Boroarg-Oh | |
| Chain H, Human Alpha-Thrombin Complexed With | gi\|1943474 |
| Ac-(D)phe-Pro-Borolys-Oh | |
| Chain H, Human Alpha-Thrombin Complexed With | gi\|1943091 |
| [s-(R,R)]-1- | |
| (Aminoiminomethyl)-N-[[1[n-[(2- | |
| Naphthalenylsulfonyl)-L- | |
| Seryl]-Pyrrolidinyl]methyl]-3-Piperidenecarboxamide | |
| (Bms-189090) | |
| Chain H, Human Alpha-Thrombin Complexed With | gi\|1943088 |
| [s-(R,R)]-4- | |
| [(Aminoiminomethyl)amino]-N-[[1-[3-Hydroxy-2-[(2- | |
| Naphthalenylsulfonyl)amino]-1- | |
| Oxopropyl]-2-Pyrrolidinyl] | |
| Methyl]butanamide | |
| (Bms-186282) | |
| Chain H, Human Alpha-Thrombin In Complex With | gi\|6435720 |
| Bivalent, Benzamidine-Based Synthetic Inhibitor | |
| Chain H, Human Alpha-Thrombin Inhibition By | gi\|2781263 |
| Cbz-Pro-Azalys-Onp | |
| Chain H, Human Alpha-Thrombin Inhibition By | gi\|2781260 |
| Eoc-D-Phe-Pro- | |
| Azalys-Onp | |
| Chain H, Human Alpha-Thrombin Ternary Complex | gi\|2624876 |
| With Exosite Inhibitor Hirugen And Active Site Inhibitor | |
| Phch2oco-D-Dpa-Pro-Boroval | |
| Chain H, Human Alpha-Thrombin Ternary Complex | gi\|2624871 |
| With The Exosite Inhibitor Hirugen And Active Site | |
| Inhibitor Phch2oco-D-Dpa-Pro-Borompg | |
| Chain H, Human Thrombin Complex With Hirudin | gi\|1942457 |
| Variant | |
| Chain H, Human Thrombin Complexed With A | gi\|38492571 |
| D-Phe-Pro-Arg-Type Inhibitor And A C-Terminal | |
| Hirudin | |
| Derived Exo-Site Inhibitor | |
| Chain H, Human Thrombin Complexed | gi\|118137385 |
| With | |
| Fragment-Based Small Molecules Occupying The S1 | |
| Pocket | |
| Chain H, Human Thrombin Complexed | gi\|118137382 |
| With | |
| Fragment-Based Small Molecules Occupying The S1 | |
| Pocket | |
| Chain H, Human Thrombin Complexed With Novel | gi\|3212496 |
| Synthetic Peptide Mimetic Inhibitor And Hirugen | |
| Chain H, Human Thrombin Complexed With Novel | gi\|3212372 |
| Synthetic Peptide Mimetic Inhibitor And Hirugen | |
| Chain H, Human Thrombin With Active Site N-Methyl- | gi\|3212619 |
| D | |
| Phenylalanyl-N- | |
| [5-(Aminoiminomethyl)amino]-1- | |
| {{benzothiazolyl)carbon | |
| yl] Butyl]-L-Prolinamide Trifluroacetate | |
| And | |
| Exosite-Hirugen | |
| Chain H, Human Thrombin-In Complex With Ub-Thr10 | gi\|163931190 |
| Chain H, Human Thrombin-In Complex With Ub-Thr11 | gi\|163931193 |
| Chain H, Human Thrombin-Inhibitor | gi\|21465766 |
| Complex | |
| Chain H, Human Thrombin-Inhibitor | gi\|21465763 |
| Complex | |
| Chain H, Interaction Of Factor Xiii Activation Peptide | gi\|12084432 |
| With Alpha-Thrombin: Crystal Structure Of The | |
| Enzyme-Substrate | |
| Complex | |
| Chain H, Knoble Inhibitor | gi\|208435756 |
| Chain H, Molecular Basis For The Inhibition Of Human | gi\|494655 |
| Alpha-Thrombin By The Macrocyclic Peptide | |
| Cyclotheonamide A | |
| Chain H, Novel Covalent Thrombin Inhibitor From | gi\|3891595 |
| Plant | |
| Extract | |
| Chain H, Novel Non-Covalent Thrombin Inhibitors | gi\|49258947 |
| Incorporating P1 4,5,6,7-Tetrahydrobenzothiazole | |
| Arginine Side Chain | |
| Mimetics | |
| Chain H, Orally Active Thrombin | gi\|114793812 |
| Inhibitors | |
| Chain H, Orally Active Thrombin | gi\|109157608 |
| Inhibitors | |
| Chain H, Orally Active Thrombin Inhibitors In Complex | gi\|119388980 |
| With Thrombin And An Exosite | |
| Decapeptide | |
| Chain H, Orally Active Thrombin Inhibitors In Complex | gi\|119388977 |
| With Thrombin Inh12 | |
| Chain H, Recruiting Zinc To Mediate Potent, Specific | gi\|157838367 |
| Inhibition Of Serine Proteases | |
| Chain H, Recruiting Zinc To Mediate Potent, Specific | gi\|157838361 |
| Inhibition Of Serine Proteases | |
| Chain H, Recruiting Zinc To Mediate Potent, Specific | gi\|157838364 |
| Inhibition Of Serine Proteases | |
| Chain H, Selectivity At S1, H2o Displacement, Upa, | gi\|157877720 |
| Tpa, Ser190ALA190 PROTEASE, | |
| STRUCTURE-Based | |
| Drug Design | |
| Chain H, Selectivity At S1, H2o Displacement, Upa, | gi\|20663562 |
| Tpa, Ser190ALA190 PROTEASE, | |
| STRUCTURE-Based | |
| Drug Design | |
| Chain H, Serine Protease | gi\|157878283 |
| Chain H, Specifity For Plasminogen Activator Inhibitor-1 | gi\|4139650 |
| Chain H, Structural Basis For Selectivity Of A Small | gi\|157838402 |
| Molecule, S1-Binding, Sub-Micromolar Inhibitor Of | |
| Urokinase Type Plasminogen Activator | |
| Chain H, Structural Basis For Selectivity Of A Small | gi\|157838394 |
| Molecule, S1-Binding, Sub-Micromolar Inhibitor Of | |
| Urokinase Type Plasminogen Activator | |
| Chain H, Structural Basis For Selectivity Of A Small | gi\|157838399 |
| Molecule, S1-Binding, Sub-Micromolar Inhibitor Of | |
| Urokinase Type Plasminogen Activator | |
| Chain H, Structure Of A Retro-Binding Peptide | gi\|1311348 |
| Inhibitor | |
| Complexed With Human Alpha-Thrombin | |
| Chain H, Structure Of The Hirugen And Hirulog 1 | gi\|494778 |
| Complexes Of Alpha-Thrombin | |
| Chain H, Structure Of The Hirugen And Hirulog 1 | gi\|494150 |
| Complexes Of Alpha-Thrombin | |
| Chain H, Structure Of The Hirulog 3-Thrombin | gi\|493795 |
| Complex | |
| And Nature Of The S′ Subsites Of Substrates And | |
| Inhibitors | |
| Chain H, Structure Of The Hirulog 3-Thrombin | gi\|493792 |
| Complex | |
| And Nature Of The S′ Subsites Of Substrates And | |
| Inhibitors | |
| Chain H, Structure Of Thrombin Inhibited | gi\|3318750 |
| By | |
| Aeruginosin298-A From A Blue-Green | |
| Alga | |
| Chain H, Structures Of The Noncovalent Complexes | gi\|494787 |
| Of | |
| Human And Bovine Prothrombin Fragment 2 With | |
| Human Ppack-Thrombin | |
| Chain H, Structures Of The Noncovalent Complexes | gi\|494783 |
| Of | |
| Human And Bovine Prothrombin Fragment 2 With | |
| Human Ppack-Thrombin | |
| Chain H, Structures Of Thrombin Complexes With A | gi\|494650 |
| Designed And A Natural Exosite Inhibitor | |
| Chain H, Structures Of Thrombin Complexes With A | gi\|494647 |
| Designed And A Natural Exosite Inhibitor | |
| Chain H, Ternary Complex Of An Orally Active | gi\|110590819 |
| Thrombin Inhibitor With Human | |
| Thrombin And A C-Terminal Hirudin | |
| Derived Exo-Sit | |
| Inhibitor | |
| Chain H, The Crystal Structure Of | gi\|5542573 |
| Alpha-Thrombin-Hirunorm Iv Complex | |
| Reveals A Novel | |
| Specificity Site Recognition Mode. | |
| Chain H, The Interaction Of Thrombin With Fibrinogen: | gi\|494028 |
| A Structural Basis For Its Specificity | |
| Chain H, The Isomorphous Structures Of | gi\|809456 |
| Prethrombin2, | |
| Hirugen-And Ppack-Thrombin: Changes | |
| Accompanying | |
| Activation And Exosite Binding To | |
| Thrombin | |
| Chain H, The Isomorphous Structures Of | gi\|809453 |
| Prethrombin2, | |
| Hirugen-And Ppack-Thrombin: Changes | |
| Accompanying | |
| Activation And Exosite Binding To | |
| Thrombin | |
| Chain H, The Refined 1.9 Angstroms Crystal Structure | gi\|494462 |
| Of Human Alpha-Thrombin: Interaction | |
| With | |
| D-Phe-Pro-Arg Chloromethylketone And Significance | |
| Of | |
| The Tyr-Pro-Pro-Trp Insertion Segment | |
| Chain H, The Refined Structure Of The | gi\|494908 |
| Hirudin-Thrombin Complex | |
| Chain H, The Structure Of A Complex Of Recombinant | gi\|494874 |
| Hirudin And Human Alpha-Thrombin | |
| Chain H, The Structure Of A Nonadecapeptide Of The | gi\|809132 |
| Fifth Egf Domain Of Thrombomodulin Complexed With | |
| Thrombin | |
| Chain H, The Structure Of Alpha-Thrombin Inhibited | gi\|576170 |
| By | |
| A 15-Mer Single-Stranded Dna Aptamer | |
| Chain H, Thrombin Complexed With A Beta-Mimetic | gi\|3318985 |
| Thiazole-Containing | |
| Inhibitor | |
| Chain H, Thrombin Complexed With Hirugen And A | gi\|3212333 |
| Beta-Strand Mimetic | |
| Inhibitor | |
| Chain H, Thrombin In Complex With | gi\|210060868 |
| Inhibitor | |
| Chain H, Thrombin In Complex With | gi\|145579364 |
| Inhibitor | |
| Chain H, Thrombin | gi\|261824819 |
| Inhibition | |
| Chain H, Thrombin | gi\|226887656 |
| Inhibition | |
| Chain H, Thrombin | gi\|226887692 |
| Inhibition | |
| Chain H, Thrombin | gi\|220702250 |
| Inhibition | |
| Chain H, Thrombin | gi\|218681577 |
| Inhibition | |
| Chain H, Thrombin | gi\|218681570 |
| Inhibition | |
| Chain H, Thrombin | gi\|220702247 |
| Inhibition | |
| Chain H, Thrombin | gi\|220702253 |
| Inhibition | |
| Chain H, Thrombin | gi\|256032574 |
| Inhibitor | |
| Chain H, Thrombin Inhibitor Complex | gi\|88191873 |
| Chain H, Thrombin Inhibitor Complex | gi\|88191870 |
| Chain H, Thrombin Inhibitor Complex | gi\|88191864 |
| Chain H, Thrombin Inhibitor Complex | gi\|88191867 |
| Chain H, Thrombin Inhibitor From | gi\|2981772 |
| Theonalla, | |
| Cyclotheanamide-Based Macrocyclic Tripeptide Motif | gi\|218681567 |
| Chain H, Thrombin | |
| Inibition | |
| Chain H, Thrombin With 3-Cycle No F | gi\|192988238 |
| Chain H, Thrombin With 3-Cycle With F | gi\|192988242 |
| Chain H, Thrombin-Methoxy | gi\|157881466 |
| Chain H, Thrombin-Methoxy2 | gi\|110590949 |
| Chain H, Thrombin:suramin Complex | gi\|163931175 |
| Chain H, Understanding Thrombin | gi\|241913173 |
| Inhibition | |
| Chain H, Understanding Thrombin | gi\|241913162 |
| Inhibition | |
| Chain H, X-Ray Crystal Structure Of | gi\|13399530 |
| Human | |
| Alpha-Thrombin With A Tripeptide Phosphonate | |
| Inhibitor. | |
| Chain H, X-Ray Crystal Structure Of Thrombin | gi\|88191876 |
| Inhibited | |
| By Synthetic Cyanopeptide Analogue Ra-1008 | |
| Chain H, X-Ray Crystal Structure Of Thrombin | gi\|88191879 |
| Inhibited | |
| By Synthetic Cyanopeptide Analogue Ra-1014 | |
| Chain H, X-Ray Structure Of The Human | gi\|13400013 |
| Alpha-Thrombin Complex | |
| With A Tripeptide | |
| Phosphonate Inhibitor. | |
| Chain K, Interaction Of Factor Xiii Activation Peptide | gi\|12084434 |
| With Alpha-Thrombin: Crystal Structure Of The | |
| Enzyme-Substrate | |
| Complex | |
| Chain K, The Structure Of A Nonadecapeptide Of The | gi\|809135 |
| Fifth Egf Domain Of Thrombomodulin Complexed With | |
| Thrombin | |
| Coagulation factor II (thrombin) [Homo sapiens] | gi\|30802115 |
| RecName: Full = Prothrombin; AltName: | gi\|135807 |
| Full = Coagulation factor II; Contains: | |
| RecName: Full = Activation peptide | |
| fragment 1; Contains: RecName: | |
| Full = Activation peptide fragment 2; | |
| Contains: RecName: Full = Thrombin light | |
| chain; | |
| Contains: RecName: Full = Thrombin | |
| heavy chain; Flags: | |
| Precursor | |
| coagulation factor II (thrombin) [Homo sapiens] | gi\|18653448 |
| coagulation factor II (thrombin), isoform CRA_a [Homo | gi\|119588383 |
| sapiens] | |
| coagulation factor II (thrombin), isoform CRA_b [Homo | gi\|119588384 |
| sapiens] | |
| coagulation factor II (thrombin), isoform CRA_c [Homo | gi\|119588385 |
| sapiens] | |
| coagulation factor II precursor variant [Homo sapiens] | gi\|62897113 |
| coagulation factor II precursor variant [Homo sapiens] | gi\|62897109 |
| prothrombin B-chain [Homo sapiens] | gi\|38018092 |
| prothrombin [Homo sapiens] | gi\|339641 |
| prothrombin [Homo sapiens] | gi\|38018090 |
| prothrombin [Homo sapiens] | gi\|67624831 |
| prothrombin preproprotein [Homo sapiens] | gi\|4503635 |
| unnamed protein product [Homo sapiens] | gi\|1335344 |
| unnamed protein product [Homo sapiens] | gi\|110623182 |
| unnamed protein product [Homo sapiens] | gi\|194383496 |
| unnamed protein product [Homo sapiens] | gi\|194373497 |
| unnamed protein product [Homo sapiens] | gi\|189066554 |

[0203] Peptide Information

| Calc. | Obsrv. | | | Start | End | |
|---|---|---|---|---|---|---|
| Mass | Mass | ±da | ±ppm | Seq. | Seq. | Sequence |
| 1220.6271 | 1220.6044 | −.0227 | −19 | 53 | 62 | NFTENDLL |
| | | | | | | VR |

| | |
|---|---|
| hypothetical protein FLJ12998, | gi\|119615827 |
| isoform CRA_c [Homo sapiens] | |

[0204] Protein Group

| | |
|---|---|
| MTHFSD protein [Homo sapiens] | gi\|219520051 |
| Methenyltetrahydrofolate synthetase domain containing | gi\|85566723 |
| [Homo sapiens] | |
| Methenyltetrahydrofolate synthetase domain containing | gi\|85566720 |
| [Homo sapiens] | |
| RecName: Full = Methenyltetrahydrofolate synthase | gi\|209572652 |
| domain-containing protein | |
| Unknown (protein for MGC: 177233) [Homo sapiens] | gi\|219520048 |
| hypothetical protein FLJ12998, isoform CRA_a [Homo | gi\|119615825 |
| sapiens] | |
| hypothetical protein FLJ12998, isoform CRA_a [Homo | gi\|119615824 |
| sapiens] | |
| hypothetical protein FLJ12998, isoform CRA_d [Homo | gi\|119615828 |
| sapiens] | |
| methenyltetrahydrofolate synthase domain-containing | gi\|226823319 |
| protein isoform 1 [Homo sapiens] | |
| methenyltetrahydrofolate synthase domain-containing | gi\|226823322 |
| protein isoform 2 [Homo sapiens] | |
| methenyltetrahydrofolate synthase domain-containing | gi\|116875838 |
| protein isoform 3 [Homo sapiens] | |
| methenyltetrahydrofolate synthase domain-containing | gi\|226823324 |
| protein isoform 4 [Homo sapiens] | |
| methenyltetrahydrofolate synthase domain-containing | gi\|226823326 |
| protein isoform 5 [Homo sapiens] | |
| unnamed protein product [Homo sapiens] | gi\|194387430 |
| unnamed protein product [Homo sapiens] | i\|10436065 |
| unnamed protein product [Homo sapiens] | gi\|10434804 |
| unnamed protein product [Homo sapiens] | gi\|40038302 |
| unnamed protein product [Homo sapiens] | gi\|40034820 |

[0205] Peptide Information

| Calc. | Obsrv. | | | Start | End | |
|---|---|---|---|---|---|---|
| Mass | Mass | ±da | ±ppm | Seq. | Seq. | Sequence |
| 6271 | 1220.6044 | −.0227 | −19 | 63 | 73 | NYSVPIGLDSR |

| | | | |
|---|---|---|---|
| | 40/B13 | | Instr./Gel |
| | | | Origin |
| | [1] Sample Project | | Instrument |
| | 20110503 | | Sample |
| | | | Name |
| Protein Name- | KH7 (SEQ ID NO. KH7) | Accession No. | |

| | |
|---|---|
| unnamed protein product [Homo sapiens] | gi\|1335098 |

[0206] Peptide Information

| | | | | Start | End | |
|---|---|---|---|---|---|---|
| Calc. Mass | Obsrv. Mass | ±da | ±ppm | Seq. | Seq. | Sequence |
| 813.4399 | 813.4447 | .0048 | 6 | 349 | 355 | LHIMAGR |
| 828.4111 | 828.4194 | .0083 | 10 | 55 | 60 | SHKWDR |
| 1070.5742 | 1070.5754 | .0012 | 1 | 191 | 199 | GEVPPRYPR |
| 1141.5889 | 1141.5918 | .0029 | 3 | 310 | 320 | GGYTLVSGYPK |
| 1142.6317 | 1142.6127 | −.019 | −17 | 80 | 89 | QGHNSVFLIK |
| 1158.4707 | 1158.4729 | .0022 | 2 | 203 | 211 | DYFMPCPGR |
| 1158.4707 | 1158.4729 | .0022 | 2 | 203 | 211 | DYFMPCPGR |
| 1220.606 | 1220.6071 | .0011 | 1 | 69 | 79 | NFPSPVDAAFR |
| 1220.606 | 1220.6071 | .0011 | 1 | 69 | 79 | NFPSPVDAAFR |
| 1268.6747 | 1268.6755 | .0008 | 1 | 186 | 196 | FDPVRGEVPPR |
| 1268.6747 | 1268.6755 | .0008 | 1 | 186 | 196 | FDPVRGEVPPR |
| 1495.6787 | 1495.6732 | −.0055 | −4 | 175 | 185 | YYCFQGNQFLR |
| 1495.6787 | 1495.6732 | −.0055 | −4 | 175 | 185 | YYCFQGNQFLR |
| 1512.6722 | 1512.702 | .0298 | 20 | 200 | 211 | DVRDYFMPCPGR |
| 1528.6672 | 1528.6807 | .0135 | 9 | 200 | 211 | DVRDYFMPCPGR |
| 1528.6672 | 1528.6807 | .0135 | 9 | 200 | 211 | DVRDYFMPCPGR |
| 1712.7698 | 1712.7638 | −.006 | −4 | 129 | 143 | GECQAEGVLFFQGDR |
| 2364.1653 | 2364.1492 | −.0161 | −7 | 108 | 128 | LLQDEFPGIPSP |
| | | | | | | LDAAVE |
| | | | | | | CHR |
| 2364.1653 | 2364.1492 | −.0161 | −7 | 108 | 128 | LLQDEFPGIPSP |
| | | | | | | LDAAVE |
| | 2364.1492 | | | | | CHR |
| 2498.2344 | 2498.2361 | .0017 | 1 | 325 | 348 | EVGTPHGIILDSV |
| | | | | | | DAAFIC |
| | | | | | | PGSSR |
| 2498.2344 | 2498.2361 | .0017 | 1 | 325 | 348 | EVGTPHGIILDSV |
| | | | | | | DAAFIC |
| | | | | | | PGSSR |

| | |
|---|---|
| hemopexin, isoform CRA_b [Homo sapiens] | gi\|119589125 |

[0207] Protein Group

| | |
|---|---|
| RecName: Full = Hemopexin; AltName: | gi\|1708182 |
| Full = Beta-1B- | |
| glycoprotein; Flags: | |
| Precursor | |
| hemopexin [Homo sapiens] | gi\|184497 |
| hemopexin precursor [Homo sapiens] | gi\|11321561 |
| hemopexin precursor [Homo sapiens] | gi\|386789 |
| unnamed protein product [Homo sapiens] | gi\|189053897 |
| unnamed protein product [Homo | gi\|80747621 |
| sapiens] | |

[0208] Peptide Information

| | | | | Start | End | |
|---|---|---|---|---|---|---|
| Calc. Mass | Obsrv. Mass | ±da | ±ppm | Seq. | Seq. | Sequence |
| 813.4399 | 813.4447 | .0048 | 6 | 372 | 378 | LHIMAGR |
| 828.4111 | 828.4194 | .0083 | 10 | 78 | 83 | SHKWDR |
| 1070.5742 | 1070.5754 | .0012 | 1 | 214 | 222 | GEVPPRYPR |
| 1141.5889 | 1141.5918 | .0029 | 3 | 333 | 343 | GGYTLVSGYPK |
| 1142.6317 | 1142.6127 | −.019 | −17 | 103 | 112 | QGHNSVFLIK |
| 1158.4707 | 1158.4729 | .0022 | 2 | 226 | 234 | DYFMPCPGR |
| 1158.4707 | 1158.4729 | .0022 | 2 | 226 | 234 | DYFMPCPGR |
| 1220.606 | 1220.6071 | .0011 | 1 | 92 | 102 | NFPSPVDAAFR |
| 1220.606 | 1220.6071 | .0011 | 1 | 92 | 102 | NFPSPVDAAFR |
| 1268.6747 | 1268.6755 | .0008 | 1 | 209 | 219 | FDPVRGEVPPR |
| 1268.6747 | 1268.6755 | .0008 | 1 | 209 | 219 | FDPVRGEVPPR |
| 1495.6787 | 1495.6732 | −.0055 | −4 | 198 | 208 | YYCFQGNQFLR |
| 1495.6787 | 1495.6732 | −.0055 | −4 | 198 | 208 | YYCFQGNQFLR |
| 1512.6722 | 1512.702 | .0298 | 20 | 223 | 234 | DVRDYFMPCPGR |
| 1528.6672 | 1528.6807 | .0135 | 9 | 223 | 234 | DVRDYFMPCPGR |
| 1528.6672 | 1528.6807 | .0135 | 9 | 223 | 234 | DVRDYFMPCPGR |
| 1712.7698 | 1712.7638 | −.006 | −4 | 152 | 166 | GECQAEGVLFFQGDR |
| 2364.1653 | 2364.1492 | −.0161 | −7 | 131 | 151 | LLQDEFPGIPSP |
| | | | | | | LDAAVE |
| | | | | | | CHR |
| 2364.1653 | 2364.1492 | −.0161 | −7 | 131 | 151 | LLQDEFPGIPSP |
| | | | | | | LDAAVE |
| | | | | | | CHR |
| 2498.2344 | 2498.2361 | .0017 | 1 | 348 | 371 | EVGTPHGIILDSV |
| | | | | | | DAAFIC |
| | | | | | | PGSSR |
| 2498.2344 | 2498.2361 | .0017 | 1 | 348 | 371 | EVGTPHGIILDSV |
| | | | | | | DAAFIC |
| | | | | | | PGSSR |

| | |
|---|---|
| HPX protein [Homo sapiens] | gi\|13529281 |

[0209] Peptide Information

| | | | | Start | End | |
|---|---|---|---|---|---|---|
| Calc. Mass | Obsrv. Mass | ±da | ±ppm | Seq. | Seq. | Sequence |
| 828.4111 | 828.4194 | .0083 | 10 | 78 | 83 | SHKWDR |
| 1070.5742 | 1070.5754 | .0012 | 1 | 214 | 222 | GEVPPRYPR |
| 1142.6317 | 1142.6127 | −.019 | −17 | 103 | 112 | QGHNSVFLIK |
| 1158.4707 | 1158.4729 | .0022 | 2 | 226 | 234 | DYFMPCPGR |
| 1158.4707 | 1158.4729 | .0022 | 2 | 226 | 234 | DYFMPCPGR |
| 1220.606 | 1220.6071 | .0011 | 1 | 92 | 102 | NFPSPVDAAFR |
| 1220.606 | 1220.6071 | .0011 | 1 | 92 | 102 | NFPSPVDAAFR |
| 1268.6747 | 1268.6755 | .0008 | 1 | 209 | 219 | FDPVRGEVPPR |
| 1268.6747 | 1268.6755 | .0008 | 1 | 209 | 219 | FDPVRGEVPPR |
| 1495.6787 | 1495.6732 | −.0055 | −4 | 198 | 208 | YYCFQGNQFLR |
| 1495.6787 | 1495.6732 | −.0055 | −4 | 198 | 208 | YYCFQGNQFLR |
| 1512.6722 | 1512.702 | .0298 | 20 | 223 | 234 | DVRDYFMPCPGR |
| 1528.6672 | 1528.6807 | .0135 | 9 | 223 | 234 | DVRDYFMPCPGR |
| 1528.6672 | 1528.6807 | .0135 | 9 | 223 | 234 | DVRDYFMPCPGR |
| 1712.7698 | 1712.7638 | −.006 | −4 | 152 | 166 | GECQAEGVLFFQGDR |
| 2364.1653 | 2364.1492 | −.0161 | −7 | 131 | 151 | LLQDEFPGIPSP |
| | | | | | | LDAAVE |
| | | | | | | CHR |
| 2364.1653 | 2364.1492 | −.0161 | −7 | 131 | 151 | LLQDEFPGIPSP |
| | | | | | | LDAAVE |
| | | | | | | CHR |

| | |
|---|---|
| hemopexin, isoform CRA_d [Homo sapiens] | gi\|119589127 |

[0210] Peptide Information

| Calc. Mass | Obsrv. Mass | ±da | ±ppm | Start Seq. | End Seq. | Sequence |
|---|---|---|---|---|---|---|
| 813.4399 | 813.4447 | .0048 | 6 | 301 | 307 | LHIMAGR |
| 828.4111 | 828.4194 | .0083 | 10 | 78 | 83 | SHKWDR |
| 1141.5889 | 1141.5918 | .0029 | 3 | 262 | 272 | GGYTLVSGYPK |
| 1142.6317 | 1142.6127 | −.019 | −17 | 103 | 112 | QGHNSVFLIK |
| 1220.606 | 1220.6071 | .0011 | 1 | 92 | 102 | NFPSPVDAAFR |
| 1220.606 | 1220.6071 | .0011 | 1 | 92 | 102 | NFPSPVDAAFR |
| 2364.1653 | 2364.1492 | −.0161 | −7 | 131 | 151 | LLQDEFPGIPSPL |
| | | | | | | DAAVE |
| | | | | | | CHR |
| 2364.1653 | 2364.1492 | −.0161 | −7 | 131 | 151 | LLQDEFPGIPSPL |
| | | | | | | DAAVE |
| | | | | | | CHR |
| 2498.2344 | 2498.2361 | .0017 | 1 | 277 | 300 | EVGTPHGIILDSV |
| | | | | | | DAAFIC |
| | | | | | | PGSSR |
| 2498.2344 | 2498.2361 | .0017 | 1 | 277 | 300 | EVGTPHGIILDSV |
| | | | | | | DAAFIC |
| | | | | | | PGSSR |

| | |
|---|---|
| hemopexin, isoform CRA_a [Homo sapiens] | gi\|119589124 |

[0211] Peptide Information

| Calc. | Obsrv. | | | Start | End | |
|---|---|---|---|---|---|---|
| Mass | Mass | ±da | ±ppm | Seq. | Seq. | Sequence |
| 813.4399 | 813.4447 | .0048 | 6 | 118 | 124 | LHIMAGR |
| 1141.5889 | 1141.5918 | .0029 | 3 | 79 | 89 | GGYTLVSG |
| | | | | | | YPK |
| 2498.2344 | 2498.2361 | .0017 | 1 | 94 | 117 | EVGTPHGI |
| | | | | | | ILDSV |
| | | | | | | DAAFIC |
| | | | | | | PGSSR |
| 2498.2344 | 2498.2361 | .0017 | 1 | 94 | 117 | EVGTPHGI |
| | | | | | | ILDSV |
| | | | | | | DAAFIC |
| | | | | | | PGSSR |

| | |
|---|---|
| hemopexin | gi\|226337 |

[0212] Peptide Information

| Calc. | Obsrv. | | | Start | End | |
|---|---|---|---|---|---|---|
| Mass | Mass | ±da | ±ppm | Seq. | Seq. | Sequence |
| 1141.5889 | 1141.5918 | .0029 | 3 | 78 | 88 | GGYTLVSG |
| | | | | | | YPK |
| 2498.2344 | 2498.2361 | .0017 | 1 | 93 | 116 | EVGTPHGI |
| | | | | | | ILDSV |
| | | | | | | DAAFIC |
| | | | | | | PGSSR |
| 2498.2344 | 2498.2361 | .0017 | 1 | 93 | 116 | EVGTPHGI |
| | | | | | | ILDSV |
| | | | | | | DAAFIC |
| | | | | | | PGSSR |

| | |
|---|---|
| hemopexin, isoform CRA_c | gi\|119589126 |
| [Homo sapiens] | |

[0213] Peptide Information

| Calc. | Obsrv. | | | Start | End | |
|---|---|---|---|---|---|---|
| Mass | Mass | ±da | ±ppm | Seq. | Seq. | Sequence |
| 813.4399 | 813.4447 | .0048 | 6 | 170 | 176 | LHIMAGR |
| 1141.5889 | 1141.5918 | .0029 | 3 | 131 | 141 | GGYTLVSG |
| | | | | | | YPK |
| 2498.2344 | 2498.2361 | .0017 | 1 | 146 | 169 | EVGTPHGI |
| | | | | | | ILDSV |
| | | | | | | DAAFIC |
| | | | | | | PGSSR |
| 2498.2344 | 2498.2361 | .0017 | 1 | 146 | 169 | EVGTPHGI |
| | | | | | | ILDSV |
| | | | | | | DAAFIC |
| | | | | | | PGSSR |

| | |
|---|---|
| unnamed protein product | gi\|221044726 |
| [Homo sapiens] | |

[0214] Peptide Information

| Calc. | Obsrv. | | | Start | End | |
|---|---|---|---|---|---|---|
| Mass | Mass | ±da | ±ppm | Seq. | Seq. | Sequence |
| 828.4111 | 828.4194 | .0083 | 10 | 78 | 83 | SHKWDR |
| 1142.6317 | 1142.6127 | −.019 | −17 | 103 | 112 | QGHNSVF |
| | | | | | | LIK |
| 1220.606 | 1220.6071 | .0011 | 1 | 92 | 102 | NFPSPVDA |
| | | | | | | AFR |
| 1220.606 | 1220.6071 | .0011 | 1 | 92 | 102 | NFPSPVDA |
| | | | | | | AFR |

| | |
|---|---|
| plectin 8 [Homo sapiens] | gi\|40849940 |

[0215] Protein Group

| | |
|---|---|
| plectin isoform 1b [Homo sapiens] | gi\|41322919 |

[0216] Peptide Information

| | | | | Start | End | |
|---|---|---|---|---|---|---|
| Calc. Mass | Obsrv. Mass | ±da | ±ppm | Seq. | Seq. | Sequence |
| 819.4393 | 819.3938 | −.0455 | −56 | 4368 | 4375 | MSAAQALK |
| 828.3668 | 828.4194 | .0526 | 63 | 748 | 753 | KYSCDR |
| 860.4108 | 860.4073 | −.0035 | −4 | 2110 | 2116 | QVEEAER |
| 860.422 | 860.4073 | −.0147 | −17 | 1623 | 1629 | AREEAER |
| 930.489 | 930.4886 | −.0004 | 0 | 2450 | 2457 | EAIAELER |
| 956.4506 | 956.4131 | −.0375 | −39 | 656 | 663 | ESYSALMR |
| 1036.5786 | 1036.5348 | −.0438 | −42 | 486 | 493 | TEYNLRLK |
| 1037.6255 | 1037.5444 | −.0811 | −78 | 51 | 58 | WVNKHLIK |
| 1068.5143 | 1068.5271 | .0128 | 12 | 171 | 179 | MVEGYQGLR |
| 1084.5455 | 1084.5914 | .0459 | 42 | 655 | 663 | KESYSALMR |
| 1107.5729 | 1107.5511 | −.0218 | −20 | 2970 | 2978 | GRLCFEG |
| | | | | | | LR |
| 1128.6121 | 1128.5707 | −.0414 | −37 | 1199 | 1207 | QRELEQL |
| | | | | | | GR |
| 1142.6528 | 1142.6127 | −.0401 | −35 | 1450 | 1458 | IEEEIRVVR |
| 1161.6296 | 1161.6194 | −.0102 | −9 | 4339 | 4348 | GLVDKIMV |
| | | | | | | DR |
| 1177.5994 | 1177.6208 | .0214 | 18 | 2548 | 2557 | LVASMEE |
| | | | | | | ARR |
| 1193.5765 | 1193.6279 | .0514 | 43 | 982 | 990 | CQRCISELK |
| 1220.6344 | 1220.6071 | −.0273 | −22 | 3993 | 4003 | MGIVGPEF |
| | | | | | | KDK |
| 1220.6555 | 1220.6071 | −.0484 | −40 | 2235 | 2244 | VQMEELS |
| | | | | | | KLK |
| 1268.6191 | 1268.6755 | .0564 | 44 | 2265 | 2274 | FLQEEAEKMK |
| 1268.6191 | 1268.6755 | .0564 | 44 | 2265 | 2274 | FLQEEAEKMK |
| 1429.8236 | 1429.7775 | −.0461 | −32 | 286 | 296 | ELVLLLLQWMR |
| 1445.8112 | 1445.7743 | −.0369 | −26 | 100 | 111 | LQNVQIALDYLR |
| 1463.858 | 1463.9216 | .0636 | 43 | 1291 | 1304 | AQLEPVASPAKK |
| | | | | | | PK |
| 1477.7316 | 1477.7634 | .0318 | 22 | 3900 | 3912 | SQVMDEATALQLR |
| 1495.7792 | 1495.6732 | −.106 | −71 | 2903 | 2916 | DVFEKATVSAPF |
| | | | | | | GK |
| 1495.7792 | 1495.6732 | −.106 | −71 | 2903 | 2916 | DVFEKATVSAPF |
| | | | | | | GK |
| 1510.702 | 1510.6783 | −.0237 | −16 | 4531 | 4547 | YASGSSASLGGP |
| | | | | | | ESAVA |
| 1512.6925 | 1512.702 | .0095 | 6 | 3832 | 3844 | DTHDQLSEPSEVR |
| 1528.739 | 1528.6807 | −.0583 | −38 | 1214 | 1227 | ESADPLGAWLQ |
| | | | | | | DAR |
| 1528.739 | 1528.6807 | −.0583 | −38 | 1214 | 1227 | ESADPLGAWLQ |
| | | | | | | DAR |
| 1544.785 | 1544.7278 | −.0572 | −37 | 1392 | 1403 | ELQQRMQEEVVR |
| 1566.7759 | 1566.7615 | −.0144 | −9 | 2888 | 2902 | AAKGGELVYTDS |
| | | | | | | EAR |
| 1613.8745 | 1613.7207 | −.1538 | −95 | 3133 | 3148 | LLDAQLSTGGIV |
| | | | | | | DPSK |
| 1667.885 | 1667.7976 | −.0874 | −52 | 1114 | 1129 | EAQAVPATLPEL |
| | | | | | | EATK |
| 1684.8402 | 1684.8882 | .048 | 28 | 1214 | 1228 | ESADPLGAWLQ |
| | | | | | | DARR |
| 1684.8402 | 1684.8882 | .048 | 28 | 1214 | 1228 | ESADPLGAWLQ |
| | | | | | | DARR |
| 1726.9083 | 1726.808 | −.1003 | −58 | 3866 | 3881 | RDDGTGQLLLPL |
| | | | | | | SDAR |
| 1869.9777 | 1869.87 | −.1077 | −58 | 2275 | 2292 | QVAEEAARLSVA |
| | | | | | | AQEAAR |
| 1883.887 | 1883.8921 | .0051 | 3 | 3549 | 3564 | AEVVETTQVYTE |
| | | | | | | EETR |
| 1915.947 | 1915.8633 | −.0837 | −44 | 3773 | 3788 | DPYTEQTISLFQA |
| | | | | | | MKK |
| 2480.3396 | 2480.2053 | −.1343 | −54 | 3647 | 3667 | LTAEDLFEARIISL |
| | | | | | | ETYNLLR |
| 2480.3396 | 2480.2053 | −.1343 | −54 | 3647 | 3667 | LTAEDLFEARIISL |
| | | | | | | ETYNLL R |

| | |
|---|---|
| plectin 11 [Homo sapiens] | gi\|40849944 |

[0217] Protein Group

| | |
|---|---|
| plectin isoform 1a [Homo sapiens] | gi\|41322923 |

[0218] Peptide Information

| | Obsrv. | | | Start | End | |
|---|---|---|---|---|---|---|
| Calc. Mass | Mass | ±da | ±ppm | Seq. | Seq. | Sequence |
| 819.4393 | 819.3938 | −.0455 | −56 | 4368 | 4375 | MSAAQALK |
| 828.3668 | 828.4194 | .0526 | 63 | 748 | 753 | KYSCDR |
| 860.4108 | 860.4073 | −.0035 | −4 | 2110 | 2116 | QVEEAER |
| 860.422 | 860.4073 | −.0147 | −17 | 1623 | 1629 | AREEAER |
| | 860.4073 | | | | | |
| 956.4506 | 956.4131 | −.0375 | −39 | 656 | 663 | ESYSALMR |
| 1036.5786 | 1036.5348 | −.0438 | −42 | 486 | 493 | TEYNLRLK |
| 1037.6255 | 1037.5444 | −.0811 | −78 | 51 | 58 | WVNKHLIK |
| 1068.5143 | 1068.5271 | .0128 | 12 | 171 | 179 | MVEGYQGLR |
| 1084.5455 | 1084.5914 | .0459 | 42 | 655 | 663 | KESYSALMR |
| 1107.5729 | 1107.5511 | −.0218 | −20 | 2970 | 2978 | GRLCFEGLR |
| 1128.6121 | 1128.5707 | −.0414 | −37 | 1199 | 1207 | QRELEQLGR |
| 1142.6528 | 1142.6127 | −.0401 | −35 | 1450 | 1458 | IEEEIRVVR |
| 1161.6296 | 1161.6194 | −.0102 | −9 | 4339 | 4348 | GLVDKIMVDR |
| 1177.5994 | 1177.6208 | .0214 | 18 | 2548 | 2557 | LVASMEEARR |
| 1193.5765 | 1193.6279 | .0514 | 43 | 982 | 990 | CQRCISELK |
| 1220.6344 | 1220.6071 | −.0273 | −22 | 3993 | 4003 | MGIVGPEFKDK |
| 1220.6555 | 1220.6071 | −.0484 | −40 | 2235 | 2244 | VQMEELSKLK |
| 1268.6191 | 1268.6755 | .0564 | 44 | 2265 | 2274 | FLQEEAEKMK |
| 1268.6191 | 1268.6755 | .0564 | 44 | 2265 | 2274 | FLQEEAEKMK |
| 1429.8236 | 1429.7775 | −.0461 | −32 | 286 | 296 | ELVLLLLQWMR |
| 1445.8112 | 1445.7743 | −.0369 | −26 | 100 | 111 | LQNVQIALDYLR |
| 1463.858 | 1463.9216 | .0636 | 43 | 1291 | 1304 | AQLEPVASPAKK |
| | | | | | | PK |
| 1477.7316 | 1477.7634 | .0318 | 22 | 3900 | 3912 | SQVMDEATALQLR |
| 1495.7792 | 1495.6732 | −.106 | −71 | 2903 | 2916 | DVFEKATVSAPF |
| | | | | | | GK |
| 1495.7792 | 1495.6732 | −.106 | −71 | 2903 | 2916 | DVFEKATVSAPF |
| | | | | | | GK |
| 1510.702 | 1510.6783 | −.0237 | −16 | 4531 | 4547 | YASGSSASLGGP |
| | | | | | | ESAVA |
| 1512.6925 | 1512.702 | .0095 | 6 | 3832 | 3844 | DTHDQLSEPSEVR |
| 1528.739 | 1528.6807 | −.0583 | −38 | 1214 | 1227 | ESADPLGAWLQD |
| | | | | | | AR |
| 1528.739 | 1528.6807 | −.0583 | −38 | 1214 | 1227 | ESADPLGAWLQD |
| | | | | | | AR |
| 1544.785 | 1544.7278 | −.0572 | −37 | 1392 | 1403 | ELQQRMQEEVVR |
| 1566.7759 | 1566.7615 | −.0144 | −9 | 2888 | 2902 | AAKGGELVYTDS |
| | | | | | | EAR |
| 1613.8745 | 1613.7207 | −.1538 | −95 | 3133 | 3148 | LLDAQLSTGGIVD |
| | | | | | | PSK |
| 1667.885 | 1667.7976 | −.0874 | −52 | 1114 | 1129 | EAQAVPATLPELE |
| | | | | | | ATK |
| 1684.8402 | 1684.8882 | .048 | 28 | 1214 | 1228 | ESADPLGAWLQD |
| | | | | | | ARR |
| 1684.8402 | 1684.8882 | .048 | 28 | 1214 | 1228 | ESADPLGAWLQD |
| | | | | | | ARR |
| 1726.9083 | 1726.808 | −.1003 | −58 | 3866 | 3881 | RDDGTGQLLLPL |
| | | | | | | SDAR |
| 1869.9777 | 1869.87 | −.1077 | −58 | 2275 | 2292 | QVAEEAARLSVA |
| | | | | | | AQEAAR |
| 1883.887 | 1883.8921 | .0051 | 3 | 3549 | 3564 | AEVVETTQVYTEE |
| | | | | | | ETR |
| 1915.947 | 1915.8633 | −.0837 | −44 | 3773 | 3788 | DPYTEQTISLFQA |
| | | | | | | MKK |
| 2480.3396 | 2480.2053 | −.1343 | −54 | 3647 | 3667 | LTAEDLFEARIISL |
| | | | | | | ETYNLLR |
| 2480.3396 | 2480.2053 | −.1343 | −54 | 3647 | 3667 | LTAEDLFEARIISL |
| | | | | | | ETYNLL R |

| | |
|---|---|
| plectin 3 [Homo sapiens] | gi\|40849934 |

[0219] Protein Group

| | |
|---|---|
| plectin isoform 1e [Homo sapiens] | gi\|41322908 |

[0220] Peptide Information

| | | | | Start | End | |
|---|---|---|---|---|---|---|
| Calc. Mass | Obsrv. Mass | ±da | ±ppm | Seq. | Seq. | Sequence |
| 819.4393 | 819.3938 | −.0455 | −56 | 4346 | 4353 | MSAAQALK |
| 828.3668 | 828.4194 | .0526 | 63 | 726 | 731 | KYSCDR |
| 860.4108 | 860.4073 | −.0035 | −4 | 2088 | 2094 | QVEEAER |
| 860.422 | 860.4073 | −.0147 | −17 | 1601 | 1607 | AREEAER |
| 930.489 | 930.4886 | −.0004 | 0 | 2428 | 2435 | EAIAELER |
| 956.4506 | 956.4131 | −.0375 | −39 | 634 | 641 | ESYSALMR |
| 1036.5786 | 1036.5348 | −.0438 | −42 | 464 | 471 | TEYNLRLK |
| 1037.6255 | 1037.5444 | −.0811 | −78 | 29 | 36 | WVNKHLIK |
| 1068.5143 | 1068.5271 | .0128 | 12 | 149 | 157 | MVEGYQGLR |
| 1084.5455 | 1084.5914 | .0459 | 42 | 633 | 641 | KESYSALMR |
| 1107.5729 | 1107.5511 | −.0218 | −20 | 2948 | 2956 | GRLCFEGLR |
| 1128.6121 | 1128.5707 | −.0414 | −37 | 1177 | 1185 | QRELEQLGR |
| 1142.6528 | 1142.6127 | −.0401 | −35 | 1428 | 1436 | IEEEIRVVR |
| 1161.6296 | 1161.6194 | −.0102 | −9 | 4317 | 4326 | GLVDKIMVDR |
| 1177.5994 | 1177.6208 | .0214 | 18 | 2526 | 2535 | LVASMEEARR |
| 1193.5765 | 1193.6279 | .0514 | 43 | 960 | 968 | CQRCISELK |
| 1220.6344 | 1220.6071 | −.0273 | −22 | 3971 | 3981 | MGIVGPEFKDK |
| 1220.6555 | 1220.6071 | −.0484 | −40 | 2213 | 2222 | VQMEELSKLK |
| 1268.6191 | 1268.6755 | .0564 | 44 | 2243 | 2252 | FLQEEAEKMK |
| 1268.6191 | 1268.6755 | .0564 | 44 | 2243 | 2252 | FLQEEAEKMK |
| 1429.8236 | 1429.7775 | −.0461 | −32 | 264 | 274 | ELVLLLLQWMR |
| 1445.8112 | 1445.7743 | −.0369 | −26 | 78 | 89 | LQNVQIALDYLR |
| 1463.858 | 1463.9216 | .0636 | 43 | 1269 | 1282 | AQLEPVASPAKK |
| | | | | | | PK |
| 1477.7316 | 1477.7634 | .0318 | 22 | 3878 | 3890 | SQVMDEATALQLR |
| 1495.7792 | 1495.6732 | −.106 | −71 | 2881 | 2894 | DVFEKATVSAPF |
| | | | | | | GK |
| 1495.7792 | 1495.6732 | −.106 | −71 | 2881 | 2894 | DVFEKATVSAPF |
| | 1495.6732 | | | | | GK |
| 1510.702 | 1510.6783 | −.0237 | −16 | 4509 | 4525 | YASGSSASLGGP |
| | | | | | | ESAVA |
| 1512.6925 | 1512.702 | .0095 | 6 | 3810 | 3822 | DTHDQLSEPSEVR |
| 1528.739 | 1528.6807 | −.0583 | −38 | 1192 | 1205 | ESADPLGAWLQD |
| | | | | | | AR |
| 1528.739 | 1528.6807 | −.0583 | −38 | 1192 | 1205 | ESADPLGAWLQD |
| | | | | | | AR |
| 1544.785 | 1544.7278 | −.0572 | −37 | 1370 | 1381 | ELQQRMQEEVVR |
| 1566.7759 | 1566.7615 | −.0144 | −9 | 2866 | 2880 | AAKGGELVYTDS |
| | | | | | | EAR |
| 1613.8745 | 1613.7207 | −.1538 | −95 | 3111 | 3126 | LLDAQLSTGGIV |
| | | | | | | DPSK |
| 1667.885 | 1667.7976 | −.0874 | −52 | 1092 | 1107 | EAQAVPATLPEL |
| | | | | | | EATK |
| 1684.8402 | 1684.8882 | .048 | 28 | 1192 | 1206 | ESADPLGAWLQ |
| | | | | | | DARR |
| 1684.8402 | 1684.8882 | .048 | 28 | 1192 | 1206 | ESADPLGAWLQ |
| | | | | | | DARR |
| 1726.9083 | 1726.808 | −.1003 | −58 | 3844 | 3859 | RDDGTGQLLLPL |
| | | | | | | SDAR |
| 1869.9777 | 1869.87 | −.1077 | −58 | 2253 | 2270 | QVAEEAARLSVA |
| | | | | | | AQEAAR |
| 1883.887 | 1883.8921 | .0051 | 3 | 3527 | 3542 | AEVVETTQVYTE |
| | | | | | | EETR |
| 1915.947 | 1915.8633 | −.0837 | −44 | 3751 | 3766 | DPYTEQTISLFQA |
| | | | | | | MKK |
| 2480.3396 | 2480.2053 | −.1343 | −54 | 3625 | 3645 | LTAEDLFEARIISL |
| | | | | | | ETYNLLR |
| 2480.3396 | 2480.2053 | −.1343 | −54 | 3625 | 3645 | LTAEDLFEARIISL |
| | | | | | | ETYNLL R |

| | |
|---|---|
| plectin 2 [Homo sapiens] | gi\|40849932 |

[0221] Protein Group

| | |
|---|---|
| plectin isoform 1f [Homo sapiens] | gi\|41322912 |

[0222] Peptide Information

| | | | | Start | | |
|---|---|---|---|---|---|---|
| Calc. Mass | Obsrv. Mass | ±da | ±ppm | Seq. | End Seq. | Sequence |
| 819.4393 | 819.3938 | −.0455 | −56 | 4354 | 4361 | MSAAQALK |
| 828.3668 | 828.4194 | .0526 | 63 | 734 | 739 | KYSCDR |
| 860.4108 | 860.4073 | −.0035 | −4 | 2096 | 2102 | QVEEAER |
| 860.422 | 860.4073 | −.0147 | −17 | 1609 | 1615 | AREEAER |
| 930.489 | 930.4886 | −.0004 | 0 | 2436 | 2443 | EAIAELER |
| 956.4506 | 956.4131 | −.0375 | −39 | 642 | 649 | ESYSALMR |
| 1036.5786 | 1036.5348 | −.0438 | −42 | 472 | 479 | TEYNLRLK |
| 1037.6255 | 1037.5444 | −.0811 | −78 | 37 | 44 | WVNKHLIK |
| 1068.5143 | 1068.5271 | .0128 | 12 | 157 | 165 | MVEGYQGLR |
| 1084.5455 | 1084.5914 | .0459 | 42 | 641 | 649 | KESYSALMR |
| 1107.5729 | 1107.5511 | −.0218 | −20 | 2956 | 2964 | GRLCFEGLR |
| 1128.6121 | 1128.5707 | −.0414 | −37 | 1185 | 1193 | QRELEQL |
| | | | | | | GR |
| 1142.6528 | 1142.6127 | −.0401 | −35 | 1436 | 1444 | IEEEIRVVR |
| 1161.6296 | 1161.6194 | −.0102 | −9 | 4325 | 4334 | GLVDKIMV |
| | | | | | | DR |
| 1177.5994 | 1177.6208 | .0214 | 18 | 2534 | 2543 | LVASMEE |
| | | | | | | ARR |
| 1193.5765 | 1193.6279 | .0514 | 43 | 968 | 976 | CQRCISELK |
| 1220.6344 | 1220.6071 | −.0273 | −22 | 3979 | 3989 | MGIVGPEF |
| | | | | | | KDK |
| 1220.6555 | 1220.6071 | −.0484 | −40 | 2221 | 2230 | VQMEELS |
| | | | | | | KLK |
| 1268.6191 | 1268.6755 | .0564 | 44 | 2251 | 2260 | FLQEEAEK |
| | | | | | | MK |
| 1268.6191 | 1268.6755 | .0564 | 44 | 2251 | 2260 | FLQEEAEK |
| | | | | | | MK |
| 1429.8236 | 1429.7775 | −.0461 | −32 | 272 | 282 | ELVLLLLQ |
| | | | | | | WMR |
| 1445.8112 | 1445.7743 | −.0369 | −26 | 86 | 97 | LQNVQIALDYLR |
| 1463.858 | 1463.9216 | .0636 | 43 | 1277 | 1290 | AQLEPVASPAKK |
| | | | | | | PK |
| 1477.7316 | 1477.7634 | .0318 | 22 | 3886 | 3898 | SQVMDEATALQLR |
| 1495.7792 | 1495.6732 | −.106 | −71 | 2889 | 2902 | DVFEKATVSAPF |
| | | | | | | GK |
| 1495.7792 | 1495.6732 | −.106 | −71 | 2889 | 2902 | DVFEKATVSAPF |
| | | | | | | GK |
| 1510.702 | 1510.6783 | −.0237 | −16 | 4517 | 4533 | YASGSSASLGGP |
| | | | | | | ESAVA |
| 1512.6925 | 1512.702 | .0095 | 6 | 3818 | 3830 | DTHDQLSEPSEVR |
| 1528.739 | 1528.6807 | −.0583 | −38 | 1200 | 1213 | ESADPLGAWLQ |
| | | | | | | DAR |
| 1528.739 | 1528.6807 | −.0583 | −38 | 1200 | 1213 | ESADPLGAWLQ |
| | | | | | | DAR |
| 1544.785 | 1544.7278 | −.0572 | −37 | 1378 | 1389 | ELQQRMQEEVVR |
| 1566.7759 | 1566.7615 | −.0144 | −9 | 2874 | 2888 | AAKGGELVYTDS |
| | | | | | | EAR |
| 1613.8745 | 1613.7207 | −.1538 | −95 | 3119 | 3134 | LLDAQLSTGGIV |
| | | | | | | DPSK |
| 1667.885 | 1667.7976 | −.0874 | −52 | 1100 | 1115 | EAQAVPATLPEL |
| | | | | | | EATK |
| 1684.8402 | 1684.8882 | .048 | 28 | 1200 | 1214 | ESADPLGAWLQ |
| | | | | | | DARR |
| 1684.8402 | 1684.8882 | .048 | 28 | 1200 | 1214 | ESADPLGAWLQ |
| | | | | | | DARR |
| 1726.9083 | 1726.808 | −.1003 | −58 | 3852 | 3867 | RDDGTGQLLLPL |
| | | | | | | SDAR |
| 1869.9777 | 1869.87 | −.1077 | −58 | 2261 | 2278 | QVAEEAARLSVA |
| | | | | | | AQEAAR |
| 1883.887 | 1883.8921 | .0051 | 3 | 3535 | 3550 | AEVVETTQVYTE |
| | | | | | | EETR |
| 1915.947 | 1915.8633 | −.0837 | −44 | 3759 | 3774 | DPYTEQTISLFQA |
| | | | | | | MKK |
| 2480.3396 | 2480.2053 | −.1343 | −54 | 3633 | 3653 | LTAEDLFEARIISL |
| | | | | | | ETYNLLR |
| 2480.3396 | 2480.2053 | −.1343 | −54 | 3633 | 3653 | LTAEDLFEARIISL |
| | | | | | | ETYNLL R |

| | |
|---|---|
| plectin 7 [Homo sapiens] | gi\|40849938 |

[0223] Protein Group

| | |
|---|---|
| plectin isoform 1d [Homo sapiens] | gi\|41322910 |

[0224] Peptide Information

| | | | | Start | | |
|---|---|---|---|---|---|---|
| Calc. Mass | Obsrv. Mass | ±da | ±ppm | Seq. | End Seq. | Sequence |
| 819.4393 | 819.3938 | −.0455 | −56 | 4336 | 4343 | MSAAQALK |
| 828.3668 | 828.4194 | .0526 | 63 | 716 | 721 | KYSCDR |
| 860.4108 | 860.4073 | −.0035 | −4 | 2078 | 2084 | QVEEAER |
| 860.422 | 860.4073 | −.0147 | −17 | 1591 | 1597 | AREEAER |
| 930.489 | 930.4886 | −.0004 | 0 | 2418 | 2425 | EAIAELER |
| 956.4506 | 956.4131 | −.0375 | −39 | 624 | 631 | ESYSALMR |
| 1036.5786 | 1036.5348 | −.0438 | −42 | 454 | 461 | TEYNLRLK |
| 1037.6255 | 1037.5444 | −.0811 | −78 | 19 | 26 | WVNKHLIK |
| 1068.5143 | 1068.5271 | .0128 | 12 | 139 | 147 | MVEGYQGLR |
| 1084.5455 | 1084.5914 | .0459 | 42 | 623 | 631 | KESYSALMR |
| 1107.5729 | 1107.5511 | −.0218 | −20 | 2938 | 2946 | GRLCFEGLR |
| 1128.6121 | 1128.5707 | −.0414 | −37 | 1167 | 1175 | QRELEQLGR |
| 1142.6528 | 1142.6127 | −.0401 | −35 | 1418 | 1426 | IEEEIRVVR |
| 1161.6296 | 1161.6194 | −.0102 | −9 | 4307 | 4316 | GLVDKIMVDR |
| 1177.5994 | 1177.6208 | .0214 | 18 | 2516 | 2525 | LVASMEEARR |
| 1193.5765 | 1193.6279 | .0514 | 43 | 950 | 958 | CQRCISELK |
| 1220.6344 | 1220.6071 | −.0273 | −22 | 3961 | 3971 | MGIVGPEFKDK |
| 1220.6555 | 1220.6071 | −.0484 | −40 | 2203 | 2212 | VQMEELSKLK |
| 1268.6191 | 1268.6755 | .0564 | 44 | 2233 | 2242 | FLQEEAEKMK |
| 1268.6191 | 1268.6755 | .0564 | 44 | 2233 | 2242 | FLQEEAEKMK |
| 1429.8236 | 1429.7775 | −.0461 | −32 | 254 | 264 | ELVLLLLQWMR |
| 1445.8112 | 1445.7743 | −.0369 | −26 | 68 | 79 | LQNVQIALDYLR |
| 1463.858 | 1463.9216 | .0636 | 43 | 1259 | 1272 | AQLEPVASPAKK |
| | | | | | | PK |
| 1477.7316 | 1477.7634 | .0318 | 22 | 3868 | 3880 | SQVMDEATALQ |
| | | | | | | LR |
| 1495.7792 | 1495.6732 | −.106 | −71 | 2871 | 2884 | DVFEKATVSAPF |
| | | | | | | GK |
| 1495.7792 | 1495.6732 | −.106 | −71 | 2871 | 2884 | DVFEKATVSAPF |
| | | | | | | GK |
| 1510.702 | 1510.6783 | −.0237 | −16 | 4499 | 4515 | YASGSSASLGG |
| | | | | | | PESAVA |
| 1512.6925 | 1512.702 | .0095 | 6 | 3800 | 3812 | DTHDQLSEPSE |
| | | | | | | VR |
| 1528.739 | 1528.6807 | −.0583 | −38 | 1182 | 1195 | ESADPLGAWLQ |
| | | | | | | DAR |
| 1528.739 | 1528.6807 | −.0583 | −38 | 1182 | 1195 | ESADPLGAWLQ |
| | | | | | | DAR |
| 1544.785 | 1544.7278 | −.0572 | −37 | 1360 | 1371 | ELQQRMQEEVVR |
| 1566.7759 | 1566.7615 | −.0144 | −9 | 2856 | 2870 | AAKGGELVYTD |
| | | | | | | SEAR |
| 1613.8745 | 1613.7207 | −.1538 | −95 | 3101 | 3116 | LLDAQLSTGGIV |
| | | | | | | DPSK |
| 1667.885 | 1667.7976 | −.0874 | −52 | 1082 | 1097 | EAQAVPATLPEL |
| | | | | | | EATK |
| 1684.8402 | 1684.8882 | .048 | 28 | 1182 | 1196 | ESADPLGAWLQ |
| | | | | | | DARR |
| 1684.8402 | 1684.8882 | .048 | 28 | 1182 | 1196 | ESADPLGAWLQ |
| | | | | | | DARR |
| 1726.9083 | 1726.808 | −.1003 | −58 | 3834 | 3849 | RDDGTGQLLLPL |
| | | | | | | SDAR |
| 1869.9777 | 1869.87 | −.1077 | −58 | 2243 | 2260 | QVAEEAARLSVA |
| | | | | | | AQEAAR |
| 1883.887 | 1883.8921 | .0051 | 3 | 3517 | 3532 | AEVVETTQVYTE |
| | | | | | | EETR |
| 1915.947 | 1915.8633 | −.0837 | −44 | 3741 | 3756 | DPYTEQTISLFQA |
| | | | | | | MKK |
| 2480.3396 | 2480.2053 | −.1343 | −54 | 3615 | 3635 | LTAEDLFEARIISL |
| | | | | | | ETYNLLR |
| 2480.3396 | 2480.2053 | −.1343 | −54 | 3615 | 3635 | LTAEDLFEARIISL |
| | | | | | | ETYNLLR |

| | |
|---|---|
| plectin 10 [Homo sapiens] | gi\|40849942 |

[0225] Protein Group

| | |
|---|---|
| plectin isoform 1g [Homo sapiens] | gi\|41322914 |

[0226] Peptide Information

| | | | | Start | | |
|---|---|---|---|---|---|---|
| Calc. Mass | Obsrv. Mass | ±da | ±ppm | Seq. | End Seq. | Sequence |
| 819.4393 | 819.3938 | −.0455 | −56 | 4372 | 4379 | MSAAQALK |
| 828.3668 | 828.4194 | .0526 | 63 | 752 | 757 | KYSCDR |
| 860.4108 | 860.4073 | −.0035 | −4 | 2114 | 2120 | QVEEAER |
| 860.422 | 860.4073 | −.0147 | −17 | 1627 | 1633 | AREEAER |
| 930.489 | 930.4886 | −.0004 | 0 | 2454 | 2461 | EAIAELER |
| 956.4506 | 956.4131 | −.0375 | −39 | 660 | 667 | ESYSALMR |
| 1036.5786 | 1036.5348 | −.0438 | −42 | 490 | 497 | TEYNLRLK |
| 1037.6255 | 1037.5444 | −.0811 | −78 | 55 | 62 | WVNKHLIK |
| 1068.5143 | 1068.5271 | .0128 | 12 | 175 | 183 | MVEGYQGLR |
| 1084.5455 | 1084.5914 | .0459 | 42 | 659 | 667 | KESYSALMR |
| 1107.5729 | 1107.5511 | −.0218 | −20 | 2974 | 2982 | GRLCFEGLR |
| 1128.6121 | 1128.5707 | −.0414 | −37 | 1203 | 1211 | QRELEQLGR |
| 1142.6528 | 1142.6127 | −.0401 | −35 | 1454 | 1462 | IEEEIRVVR |
| 1161.6296 | 1161.6194 | −.0102 | −9 | 4343 | 4352 | GLVDKIMVDR |
| 1177.5994 | 1177.6208 | .0214 | 18 | 2552 | 2561 | LVASMEEARR |
| 1193.5765 | 1193.6279 | .0514 | 43 | 986 | 994 | CQRCISELK |
| 1220.6344 | 1220.6071 | −.0273 | −22 | 3997 | 4007 | MGIVGPEFKDK |
| 1220.6555 | 1220.6071 | −.0484 | −40 | 2239 | 2248 | VQMEELSKLK |
| 1268.6191 | 1268.6755 | .0564 | 44 | 2269 | 2278 | FLQEEAEKMK |
| | 1268.6755 | | | | | |
| 1268.6191 | 1268.6755 | .0564 | 44 | 2269 | 2278 | FLQEEAEKMK |
| 1429.8236 | 1429.7775 | −.0461 | −32 | 290 | 300 | ELVLLLLQWMR |
| 1445.8112 | 1445.7743 | −.0369 | −26 | 104 | 115 | LQNVQIALDYLR |
| 1463.858 | 1463.9216 | .0636 | 43 | 1295 | 1308 | AQLEPVASPAKK |
| | | | | | | PK |
| 1477.7316 | 1477.7634 | .0318 | 22 | 3904 | 3916 | SQVMDEATALQLR |
| 1495.7792 | 1495.6732 | −.106 | −71 | 2907 | 2920 | DVFEKATVSAPF |
| | | | | | | GK |
| 1495.7792 | 1495.6732 | −.106 | −71 | 2907 | 2920 | DVFEKATVSAPF |
| | | | | | | GK |
| 1510.702 | 1510.6783 | −.0237 | −16 | 4535 | 4551 | YASGSSASLGGP |
| | | | | | | ESAVA |
| 1512.6925 | 1512.702 | .0095 | 6 | 3836 | 3848 | DTHDQLSEPSEVR |
| 1528.739 | 1528.6807 | −.0583 | −38 | 1218 | 1231 | ESADPLGAWLQ |
| | | | | | | DAR |
| 1528.739 | 1528.6807 | −.0583 | −38 | 1218 | 1231 | ESADPLGAWLQ |
| | | | | | | DAR |
| 1544.785 | 1544.7278 | −.0572 | −37 | 1396 | 1407 | ELQQRMQEEVVR |
| 1566.7759 | 1566.7615 | −.0144 | −9 | 2892 | 2906 | AAKGGELVYTDS |
| | | | | | | EAR |
| 1613.8745 | 1613.7207 | −.1538 | −95 | 3137 | 3152 | LLDAQLSTGGIV |
| | | | | | | DPSK |
| 1667.885 | 1667.7976 | −.0874 | −52 | 1118 | 1133 | EAQAVPATLPEL |
| | | | | | | EATK |
| 1684.8402 | 1684.8882 | .048 | 28 | 1218 | 1232 | ESADPLGAWLQ |
| | | | | | | DARR |
| 1684.8402 | 1684.8882 | .048 | 28 | 1218 | 1232 | ESADPLGAWLQ |
| | | | | | | DARR |
| 1726.9083 | 1726.808 | −.1003 | −58 | 3870 | 3885 | RDDGTGQLLLPL |
| | | | | | | SDAR |
| 1869.9777 | 1869.87 | −.1077 | −58 | 2279 | 2296 | QVAEEAARLSVA |
| | | | | | | AQEAAR |
| 1883.887 | 1883.8921 | .0051 | 3 | 3553 | 3568 | AEVVETTQVYTE |
| | | | | | | EETR |
| 1915.947 | 1915.8633 | −.0837 | −44 | 3777 | 3792 | DPYTEQTISLFQA |
| | | | | | | MKK |
| 2480.3396 | 2480.2053 | −.1343 | −54 | 3651 | 3671 | LTAEDLFEARIISL |
| | | | | | | ETYNLLR |
| 2480.3396 | 2480.2053 | −.1343 | −54 | 3651 | 3671 | LTAEDLFEARIISL |
| | | | | | | ETYNLLR |

| | |
|---|---|
| plectin 1 [Homo sapiens] | gi\|40849930 |

[0227] Protein Group

| | |
|---|---|
| plectin isoform 1c [Homo sapiens] | gi\|47607492 |

[0228] Peptide Information

| | | | | Start | | |
|---|---|---|---|---|---|---|
| Calc. Mass | Obsrv. Mass | ±da | ±ppm | Seq. | End Seq. | Sequence |
| 819.4393 | 819.3938 | −.0455 | −56 | 4395 | 4402 | MSAAQALK |
| 828.3668 | 828.4194 | .0526 | 63 | 775 | 780 | KYSCDR |
| 860.4108 | 860.4073 | −.0035 | −4 | 2137 | 2143 | QVEEAER |
| 860.422 | 860.4073 | −.0147 | −17 | 1650 | 1656 | AREEAER |
| 930.489 | 930.4886 | −.0004 | 0 | 2477 | 2484 | EAIAELER |
| 956.4506 | 956.4131 | −.0375 | −39 | 683 | 690 | ESYSALMR |
| 1036.5786 | 1036.5348 | −.0438 | −42 | 513 | 520 | TEYNLRLK |
| 1037.6255 | 1037.5444 | −.0811 | −78 | 78 | 85 | WVNKHLIK |
| 1068.5143 | 1068.5271 | .0128 | 12 | 198 | 206 | MVEGYQGLR |
| 1084.5455 | 1084.5914 | .0459 | 42 | 682 | 690 | KESYSALMR |
| 1107.5729 | 1107.5511 | −.0218 | −20 | 2997 | 3005 | GRLCFEGLR |
| 1128.6121 | 1128.5707 | −.0414 | −37 | 1226 | 1234 | QRELEQLGR |
| 1142.6528 | 1142.6127 | −.0401 | −35 | 1477 | 1485 | IEEEIRVVR |
| 1161.6296 | 1161.6194 | −.0102 | −9 | 4366 | 4375 | GLVDKIMVDR |
| 1177.5994 | 1177.6208 | .0214 | 18 | 2575 | 2584 | LVASMEEARR |
| 1193.5765 | 1193.6279 | .0514 | 43 | 1009 | 1017 | CQRCISELK |
| 1220.6344 | 1220.6071 | −.0273 | −22 | 4020 | 4030 | MGIVGPEFKDK |
| 1220.6555 | 1220.6071 | −.0484 | −40 | 2262 | 2271 | VQMEELSKLK |
| 1268.6191 | 1268.6755 | .0564 | 44 | 2292 | 2301 | FLQEEAEKMK |
| 1268.6191 | 1268.6755 | .0564 | 44 | 2292 | 2301 | FLQEEAEKMK |
| 1429.8236 | 1429.7775 | −.0461 | −32 | 313 | 323 | ELVLLLLQWMR |
| 1445.8112 | 1445.7743 | −.0369 | −26 | 127 | 138 | LQNVQIALDYLR |
| 1463.858 | 1463.9216 | .0636 | 43 | 1318 | 1331 | AQLEPVASPAKK |
| | | | | | | PK |
| 1477.7316 | 1477.7634 | .0318 | 22 | 3927 | 3939 | SQVMDEATALQ |
| | | | | | | LR |
| 1495.7792 | 1495.6732 | −.106 | −71 | 2930 | 2943 | DVFEKATVSAPF |
| | | | | | | GK |
| 1495.7792 | 1495.6732 | −.106 | −71 | 2930 | 2943 | DVFEKATVSAPF |
| | | | | | | GK |
| 1510.702 | 1510.6783 | −.0237 | −16 | 4558 | 4574 | YASGSSASLGG |
| | | | | | | PESAVA |
| 1512.6925 | 1512.702 | .0095 | 6 | 3859 | 3871 | DTHDQLSEPSE |
| | | | | | | VR |
| 1528.739 | 1528.6807 | −.0583 | −38 | 1241 | 1254 | ESADPLGAWLQ |
| | | | | | | DAR |
| 1528.739 | 1528.6807 | −.0583 | −38 | 1241 | 1254 | ESADPLGAWLQ |
| | | | | | | DAR |
| 1544.785 | 1544.7278 | −.0572 | −37 | 1419 | 1430 | ELQQRMQEEVVR |
| 1566.7759 | 1566.7615 | −.0144 | −9 | 2915 | 2929 | AAKGGELVYTD |
| | | | | | | SEAR |
| 1613.8745 | 1613.7207 | −.1538 | −95 | 3160 | 3175 | LLDAQLSTGGIV |
| | | | | | | DPSK |
| 1667.885 | 1667.7976 | −.0874 | −52 | 1141 | 1156 | EAQAVPATLPEL |
| | | | | | | EATK |
| 1684.8402 | 1684.8882 | .048 | 28 | 1241 | 1255 | ESADPLGAWLQ |
| | | | | | | DARR |
| 1684.8402 | 1684.8882 | .048 | 28 | 1241 | 1255 | ESADPLGAWLQ |
| | | | | | | DARR |
| 1726.9083 | 1726.808 | −.1003 | −58 | 3893 | 3908 | RDDGTGQLLLPL |
| | | | | | | SDAR |
| 1869.9777 | 1869.87 | −.1077 | −58 | 2302 | 2319 | QVAEEAARLSVA |
| | | | | | | AQEAAR |
| 1883.887 | 1883.8921 | .0051 | 3 | 3576 | 3591 | AEVVETTQVYTE |
| | | | | | | EETR |
| 1915.947 | 1915.8633 | −.0837 | −44 | 3800 | 3815 | DPYTEQTISLFQA |
| | | | | | | MKK |
| 2480.3396 | 2480.2053 | −.1343 | −54 | 3674 | 3694 | LTAEDLFEARIISL |
| | | | | | | ETYNLLR |
| | 2480.2053 | | | | | |
| 2480.3396 | 2480.2053 | −.1343 | −54 | 3674 | 3694 | LTAEDLFEARIISL |
| | | | | | | ETYNLLR |

| | |
|---|---|
| plectin [Homo sapiens] | gi\|1477651 |

[0229] Protein Group

| | |
|---|---|
| plectin [Homo sapiens] | gi\|1477646 |

[0230] Peptide Information

| | | | | Start | | |
|---|---|---|---|---|---|---|
| Calc. Mass | Obsrv. Mass | ±da | ±ppm | Seq. | End Seq. | Sequence |
| 819.4393 | 819.3938 | −.0455 | −56 | 4395 | 4402 | MSAAQALK |
| 828.3668 | 828.4194 | .0526 | 63 | 775 | 780 | KYSCDR |
| 860.4108 | 860.4073 | −.0035 | −4 | 2137 | 2143 | QVEEAER |
| 860.422 | 860.4073 | −.0147 | −17 | 1650 | 1656 | AREEAER |
| 930.489 | 930.4886 | −.0004 | 0 | 2477 | 2484 | EAIAELER |
| 956.4506 | 956.4131 | −.0375 | −39 | 683 | 690 | ESYSALMR |
| 1036.5786 | 1036.5348 | −.0438 | −42 | 513 | 520 | TEYNLRLK |
| 1037.6255 | 1037.5444 | −.0811 | −78 | 78 | 85 | WVNKHLIK |
| 1068.5143 | 1068.5271 | .0128 | 12 | 198 | 206 | MVEGYQGLR |
| 1084.5455 | 1084.5914 | .0459 | 42 | 682 | 690 | KESYSALMR |
| 1107.5729 | 1107.5511 | −.0218 | −20 | 2997 | 3005 | GRLCFEGLR |
| 1128.6121 | 1128.5707 | −.0414 | −37 | 1226 | 1234 | QRELEQLGR |
| 1142.6528 | 1142.6127 | −.0401 | −35 | 1477 | 1485 | IEEEIRVVR |
| 1161.6296 | 1161.6194 | −.0102 | −9 | 4366 | 4375 | GLVDKIMVDR |
| 1177.5994 | 1177.6208 | .0214 | 18 | 2575 | 2584 | LVASMEEARR |
| 1193.5765 | 1193.6279 | .0514 | 43 | 1009 | 1017 | CQRCISELK |
| 1220.6344 | 1220.6071 | −.0273 | −22 | 4020 | 4030 | MGIVGPEFKDK |
| 1220.6555 | 1220.6071 | −.0484 | −40 | 2262 | 2271 | VQMEELSKLK |
| 1268.6191 | 1268.6755 | .0564 | 44 | 2292 | 2301 | FLQEEAEKMK |
| 1268.6191 | 1268.6755 | .0564 | 44 | 2292 | 2301 | FLQEEAEKMK |
| 1429.8236 | 1429.7775 | −.0461 | −32 | 313 | 323 | ELVLLLLQWMR |
| 1445.8112 | 1445.7743 | −.0369 | −26 | 127 | 138 | LQNVQIALDYLR |
| 1463.858 | 1463.9216 | .0636 | 43 | 1318 | 1331 | AQLEPVASPAKK |
| | | | | | | PK |
| 1477.7316 | 1477.7634 | .0318 | 22 | 3927 | 3939 | SQVMDEATALQLR |
| 1495.7792 | 1495.6732 | −.106 | −71 | 2930 | 2943 | DVFEKATVSA |
| | | | | | | PFGK |
| 1495.7792 | 1495.6732 | −.106 | −71 | 2930 | 2943 | DVFEKATVSA |
| | | | | | | PFGK |
| 1510.702 | 1510.6783 | −.0237 | −16 | 4558 | 4574 | YASGSSASLGGP |
| | | | | | | ESAVA |
| 1512.6925 | 1512.702 | .0095 | 6 | 3859 | 3871 | DTHDQLSEPSEVR |
| 1528.739 | 1528.6807 | −.0583 | −38 | 1241 | 1254 | ESADPLGAWLQ |
| | | | | | | DAR |
| 1528.739 | 1528.6807 | −.0583 | −38 | 1241 | 1254 | ESADPLGAWLQ |
| | | | | | | DAR |
| 1544.785 | 1544.7278 | −.0572 | −37 | 1419 | 1430 | ELQQRMQEEVVR |
| 1566.8347 | 1566.7615 | −.0732 | −47 | 2699 | 2712 | LAQGHTTVDELA |
| | | | | | | RR |
| 1613.8745 | 1613.7207 | −.1538 | −95 | 3160 | 3175 | LLDAQLSTGGIV |
| | | | | | | DPSK |
| 1667.885 | 1667.7976 | −.0874 | −52 | 1141 | 1156 | EAQAVPATLPEL |
| | | | | | | EATK |
| 1684.8402 | 1684.8882 | .048 | 28 | 1241 | 1255 | ESADPLGAWLQ |
| | | | | | | DARR |
| 1684.8402 | 1684.8882 | .048 | 28 | 1241 | 1255 | ESADPLGAWLQ |
| | | | | | | DARR |
| 1726.9083 | 1726.808 | −.1003 | −58 | 3893 | 3908 | RDDGTGQLLLPL |
| | | | | | | SDAR |
| 1869.9777 | 1869.87 | −.1077 | −58 | 2302 | 2319 | QVAEEAARLSVA |
| | | | | | | AQEAAR |
| 1883.887 | 1883.8921 | .0051 | 3 | 3576 | 3591 | AEVVETTQVYTE |
| | | | | | | EETR |
| 1915.947 | 1915.8633 | −.0837 | −44 | 3800 | 3815 | DPYTEQTISLFQA |
| | | | | | | MKK |
| 2480.3396 | 2480.2053 | −.1343 | −54 | 3674 | 3694 | LTAEDLFEARIISL |
| | | | | | | ETYNLLR |
| 2480.3396 | 2480.2053 | −.1343 | −54 | 3674 | 3694 | LTAEDLFEARIISL |
| | | | | | | ETYNLLR |

| | |
|---|---|
| plectin isoform 1 [Homo sapiens] | gi\|41322916 |

[0231] Protein Group

| | |
|---|---|
| RecName: Full = Plectin; Short = PCN; Short = PLTN; | gi\|209572726 |
| AltName: Full = Hemidesmosomal | |
| protein 1; Short = HD1; | |
| AltName: Full = Plectin-1 | |
| plectin 6 [Homo sapiens] | gi\|40849936 |
| unnamed protein product [Homo sapiens] | gi\|218103024 |
| unnamed protein product [Homo sapiens] | gi\|211637717 |
| unnamed protein product [Homo sapiens] | gi\|158066003 |
| unnamed protein product [Homo sapiens] | gi\|157391371 |

[0232] Peptide Information

| | | | | Start | | |
|---|---|---|---|---|---|---|
| Calc. Mass | Obsrv. Mass | ±da | ±ppm | Seq. | End Seq. | Sequence |
| 819.4393 | 819.3938 | −.0455 | −56 | 4505 | 4512 | MSAAQALK |
| 828.3668 | 828.4194 | .0526 | 63 | 885 | 890 | KYSCDR |
| 860.4108 | 860.4073 | −.0035 | −4 | 2247 | 2253 | QVEEAER |
| 860.422 | 860.4073 | −.0147 | −17 | 1760 | 1766 | AREEAER |
| 930.489 | 930.4886 | −.0004 | 0 | 2587 | 2594 | EAIAELER |
| 956.4506 | 956.4131 | −.0375 | −39 | 793 | 800 | ESYSALMR |
| 1036.5786 | 1036.5348 | −.0438 | −42 | 623 | 630 | TEYNLRLK |
| 1037.4941 | 1037.5444 | .0503 | 48 | 1 | 9 | MVAGMLMPR |
| 1068.5143 | 1068.5271 | .0128 | 12 | 308 | 316 | MVEGYQGLR |
| 1084.5455 | 1084.5914 | .0459 | 42 | 792 | 800 | KESYSALMR |
| 1107.5729 | 1107.5511 | −.0218 | −20 | 3107 | 3115 | GRLCFEGLR |
| 1128.6121 | 1128.5707 | −.0414 | −37 | 1336 | 1344 | QRELEQLGR |
| 1142.6528 | 1142.6127 | −.0401 | −35 | 1587 | 1595 | IEEEIRVVR |
| 1161.6296 | 1161.6194 | −.0102 | −9 | 4476 | 4485 | GLVDKIMVDR |
| 1177.5994 | 1177.6208 | .0214 | 18 | 2685 | 2694 | LVASMEEARR |
| 1193.5765 | 1193.6279 | .0514 | 43 | 1119 | 1127 | CQRCISELK |
| 1220.6344 | 1220.6071 | −.0273 | −22 | 4130 | 4140 | MGIVGPEFKDK |
| 1220.6555 | 1220.6071 | −.0484 | −40 | 2372 | 2381 | VQMEELSKLK |
| 1268.6191 | 1268.6755 | .0564 | 44 | 2402 | 2411 | FLQEEAEKMK |
| 1268.6191 | 1268.6755 | .0564 | 44 | 2402 | 2411 | FLQEEAEKMK |
| 1429.8236 | 1429.7775 | −.0461 | −32 | 423 | 433 | ELVLLLLQWMR |
| 1445.8112 | 1445.7743 | −.0369 | −26 | 237 | 248 | LQNVQIALDYLR |
| 1463.858 | 1463.9216 | .0636 | 43 | 1428 | 1441 | AQLEPVASPAKK |
| | | | | | | PK |
| 1477.7316 | 1477.7634 | .0318 | 22 | 4037 | 4049 | SQVMDEATALQLR |
| 1495.7792 | 1495.6732 | −.106 | −71 | 3040 | 3053 | DVFEKATVSAPF |
| | | | | | | GK |
| 1495.7792 | 1495.6732 | −.106 | −71 | 3040 | 3053 | DVFEKATVSAPF |
| | | | | | | GK |
| 1510.702 | 1510.6783 | −.0237 | −16 | 4668 | 4684 | YASGSSASLGGP |
| | | | | | | ESAVA |
| 1512.6925 | 1512.702 | .0095 | 6 | 3969 | 3981 | DTHDQLSEPSEVR |
| 1528.739 | 1528.6807 | −.0583 | −38 | 1351 | 1364 | ESADPLGAWLQD |
| | | | | | | AR |
| 1528.739 | 1528.6807 | −.0583 | −38 | 1351 | 1364 | ESADPLGAWLQD |
| | | | | | | AR |
| 1544.785 | 1544.7278 | −.0572 | −37 | 1529 | 1540 | ELQQRMQEEVVR |
| 1566.7759 | 1566.7615 | −.0144 | −9 | 3025 | 3039 | AAKGGELVYTDS |
| | | | | | | EAR |
| 1613.8745 | 1613.7207 | −.1538 | −95 | 3270 | 3285 | LLDAQLSTGGIVD |
| | | | | | | PSK |
| 1667.885 | 1667.7976 | −.0874 | −52 | 1251 | 1266 | EAQAVPATLPELE |
| | | | | | | ATK |
| 1684.8402 | 1684.8882 | .048 | 28 | 1351 | 1365 | ESADPLGAWLQD |
| | | | | | | ARR |
| 1684.8402 | 1684.8882 | .048 | 28 | 1351 | 1365 | ESADPLGAWLQ |
| | | | | | | DARR |
| 1726.9083 | 1726.808 | −.1003 | −58 | 4003 | 4018 | RDDGTGQLLLPL |
| | | | | | | SDAR |
| 1869.9777 | 1869.87 | −.1077 | −58 | 2412 | 2429 | QVAEEAARLSV |
| | | | | | | AAQEAAR |
| 1883.887 | 1883.8921 | .0051 | 3 | 3686 | 3701 | AEVVETTQVYTE |
| | | | | | | EETR |
| 1915.947 | 1915.8633 | −.0837 | −44 | 3910 | 3925 | DPYTEQTISLFQA |
| | | | | | | MKK |
| 2480.3396 | 2480.2053 | −.1343 | −54 | 3784 | 3804 | LTAEDLFEARIISL |
| | | | | | | ETYNLLR |
| 2480.3396 | 2480.2053 | −.1343 | −54 | 3784 | 3804 | LTAEDLFEARIISL |
| | | | | | | ETYNLLR |

| | |
|---|---|
| hypothetical protein LOC134121 [Homo sapiens] | gi\|148237105 |

[0233] Protein Group

| | |
|---|---|
| Chromosome 5 open reading frame 49 [Homo sapiens] | gi\|144719176 |
| Chromosome 5 open reading frame 49 [Homo sapiens] | gi\|144719146 |
| RecName: Full = Uncharacterized protein C5orf49 | gi\|189041165 |
| hCG1643563 [Homo sapiens] | gi\|119628501 |

[0234] Peptide Information

| | | | | Start | | |
|---|---|---|---|---|---|---|
| Calc. Mass | Obsrv. Mass | ±da | ±ppm | Seq. | End Seq. | Sequence |
| 811.4169 | 811.4042 | −.0127 | −16 | 70 | 75 | LHRDDR |
| 870.4064 | 870.48 | .0736 | 85 | 73 | 79 | DDREHAK |
| 1193.6637 | 1193.6279 | −.0358 | −30 | 106 | 115 | INQPIEPLNR |
| 1220.5807 | 1220.6071 | .0264 | 22 | 120 | 129 | ANHVQADFYR |
| 1220.5807 | 1220.6071 | .0264 | 22 | 120 | 129 | ANHVQADFYR |
| 1349.7648 | 1349.6904 | −.0744 | −55 | 105 | 115 | RINQPIEPLNR |
| 1429.7396 | 1429.7775 | .0379 | 27 | 50 | 61 | TGIISLYDCIFK |
| 1495.6395 | 1495.6732 | .0337 | 23 | 2 | 14 | EDDEEETTASTLR |
| 1495.6395 | 1495.6732 | .0337 | 23 | 2 | 14 | EDDEEETTASTLR |

| | |
|---|---|
| coagulation factor V [Homo sapiens] | gi\|85718563 |

[0235] Peptide Information

| | | | | Start | | |
|---|---|---|---|---|---|---|
| Calc. Mass | Obsrv. Mass | ±da | ±ppm | Seq. | End Seq. | Sequence |
| 930.5367 | 930.4886 | −.0481 | −52 | 52 | 59 | AQVRDTLK |
| 956.4618 | 956.4131 | −.0487 | −51 | 34 | 41 | HTVNPNMK |
| 1082.6205 | 1082.5989 | −.0216 | −20 | 42 | 51 | EDGILGPIIR |
| 1487.7238 | 1487.7268 | .003 | 2 | 4 | 16 | SQHLDNFSNQI |
| | | | | | | GK |
| 1544.734 | 1544.7278 | −.0062 | −4 | 60 | 72 | VSNTNTESWE |
| | | | | | | KLH |
| 1915.9409 | 1915.8633 | −.0776 | −41 | 4 | 19 | SQHLDNFSNQI |
| | | | | | | GKHYK |

| | |
|---|---|
| PREDICTED: putative zinc finger protein | gi\|310133350 |
| 705E-like [Homo sapiens] | |

[0236] Peptide Information

| | | | | Start | | |
|---|---|---|---|---|---|---|
| Calc. Mass | Obsrv. Mass | ±da | ±ppm | Seq. | End Seq. | Sequence |
| 811.4785 | 811.4042 | −.0743 | −92 | 108 | 114 | QIHTKGK |
| 995.5156 | 995.5454 | .0298 | 30 | 236 | 244 | AFSLSSDLR |
| 1158.452 | 1158.4729 | .0209 | 18 | 199 | 207 | WYECDNSGK |
| 1158.452 | 1158.4729 | .0209 | 18 | 199 | 207 | WYECDNSGK |
| 1193.5579 | 1193.6279 | .07 | 59 | 1 | 12 | MAAGLSANESSR |
| 1463.7974 | 1463.9216 | .1242 | 85 | 31 | 42 | THMISMHPIIRK |
| 1487.8192 | 1487.7268 | −.0924 | −62 | 13 | 24 | FPMRPPFLVIDR |
| 1495.7872 | 1495.6732 | −.114 | −76 | 31 | 42 | THMISMHPIIRK |
| 1495.7872 | 1495.6732 | −.114 | −76 | 30 | 41 | KTHMISMHPIIR |
| 2364.0317 | 2364.1492 | .1175 | 50 | 115 | 132 | SYQCNLCEKAYT |
| | | | | | | NCFHLR |
| 2364.0317 | 2364.1492 | .1175 | 50 | 115 | 132 | SYQCNLCEKAYT |
| | | | | | | NCFHLR |

| | | | |
|---|---|---|---|
| | 41/B14 | | Instr./Gel |
| | | | Origin |
| | [1] Sample Project | | Instrument |
| | 20110503 | | Sample |
| | | | Name |
| Protein Name - | KH8 (SEQ ID NO. KH8) | Accession No. | |

| | |
|---|---|
| unnamed protein product [Homo sapiens] | gi\|1335098 |

[0237] Peptide Information

| | Obsrv. | | | Start | | |
|---|---|---|---|---|---|---|
| Calc. Mass | Mass | ±da | ±ppm | Seq. | End Seq. | Sequence |
| 813.4399 | 813.4328 | −.0071 | −9 | 349 | 355 | LHIMAGR |
| 828.4111 | 828.4098 | −.0013 | −2 | 55 | 60 | SHKWDR |
| 1070.5742 | 1070.5739 | −.0003 | 0 | 191 | 199 | GEVPPRYPR |
| 1129.6517 | 1129.6481 | −.0036 | −3 | 356 | 363 | RLWWLDLK |
| 1141.5889 | 1141.5925 | .0036 | 3 | 310 | 320 | GGYTLVSG |
| | | | | | | YPK |
| 1142.6317 | 1142.6134 | −.0183 | −16 | 80 | 89 | QGHNSVFLIK |
| 1158.4707 | 1158.472 | .0013 | 1 | 203 | 211 | DYFMPCPGR |
| 1158.4707 | 1158.472 | .0013 | 1 | 203 | 211 | DYFMPCPGR |
| 1220.606 | 1220.6074 | .0014 | 1 | 69 | 79 | NFPSPVDA |
| | | | | | | AFR |
| 1220.606 | 1220.6074 | .0014 | 1 | 69 | 79 | NFPSPVDA |
| | | | | | | AFR |
| 1268.6747 | 1268.674 | −.0007 | −1 | 186 | 196 | FDPVRGEV |
| | | | | | | PPR |
| 1297.6899 | 1297.6924 | .0025 | 2 | 310 | 321 | GGYTLVSG |
| | | | | | | YPKR |
| 1495.6787 | 1495.6833 | .0046 | 3 | 175 | 185 | YYCFQGNQFLR |
| 1495.6787 | 1495.6833 | .0046 | 3 | 175 | 185 | YYCFQGNQFLR |
| 1512.6722 | 1512.6998 | .0276 | 18 | 200 | 211 | DVRDYFMPCPGR |
| 1528.6672 | 1528.6842 | .017 | 11 | 200 | 211 | DVRDYFMPCPGR |
| 1528.6672 | 1528.6842 | .017 | 11 | 200 | 211 | DVRDYFMPCPGR |
| 1534.7802 | 1534.7842 | .004 | 3 | 67 | 79 | WKNFPSPVDAA |
| | | | | | | FR |
| 1712.7698 | 1712.8146 | .0448 | 26 | 129 | 143 | GECQAEGVLFF |
| | | | | | | QGDR |
| 1837.8868 | 1837.9355 | .0487 | 26 | 364 | 379 | SGAQATWTELP |
| | | | | | | WPHEK |
| 2364.1653 | 2364.1904 | .0251 | 11 | 108 | 128 | LLQDEFPGIPSP |
| | | | | | | LDAAVE |
| | | | | | | CHR |
| 2364.1653 | 2364.1904 | .0251 | 11 | 108 | 128 | LLQDEFPGIPSP |
| | | | | | | LDAAVE |
| | | | | | | CHR |
| 2498.2344 | 2498.2678 | .0334 | 13 | 325 | 348 | EVGTPHGIILDSV |
| | | | | | | DAAFIC |
| | | | | | | PGSSR |
| 2498.2344 | 2498.2678 | .0334 | 13 | 325 | 348 | EVGTPHGIILDSV |
| | | | | | | DAAFIC PGSSR |

| | |
|---|---|
| hemopexin, isoform CRA_b [Homo sapiens] | gi\|119589125 |

[0238] Protein Group

| | |
|---|---|
| RecName: Full = Hemopexin; AltName: | gi\|1708182 |
| Full = Beta-1B- | |
| glycoprotein; Flags: | |
| Precursor | |
| hemopexin [Homo sapiens] | gi\|184497 |
| hemopexin precursor [Homo sapiens] | gi\|11321561 |
| hemopexin precursor [Homo sapiens] | gi\|386789 |
| unnamed protein product [Homo sapiens] | gi\|189053897 |
| unnamed protein product [Homo sapiens] | |
| unnamed protein product [Homo sapiens] | gi\|80747621 |

[0239] Peptide Information

| | Obsrv. | | | Start | | |
|---|---|---|---|---|---|---|
| Calc. Mass | Mass | ±da | ±ppm | Seq. | End Seq. | Sequence |
| 813.4399 | 813.4328 | −.0071 | −9 | 372 | 378 | LHIMAGR |
| 828.4111 | 828.4098 | −.0013 | −2 | 78 | 83 | SHKWDR |
| 1070.5742 | 1070.5739 | −.0003 | 0 | 214 | 222 | GEVPPRYPR |
| 1129.6517 | 1129.6481 | −.0036 | −3 | 379 | 386 | RLWWLDLK |
| 1141.5889 | 1141.5925 | .0036 | 3 | 333 | 343 | GGYTLVSGYPK |
| 1142.6317 | 1142.6134 | −.0183 | −16 | 103 | 112 | QGHNSVFLIK |
| 1158.4707 | 1158.472 | .0013 | 1 | 226 | 234 | DYFMPCPGR |
| 1158.4707 | 1158.472 | .0013 | 1 | 226 | 234 | DYFMPCPGR |
| 1220.606 | 1220.6074 | .0014 | 1 | 92 | 102 | NFPSPVDAAFR |
| 1220.606 | 1220.6074 | .0014 | 1 | 92 | 102 | NFPSPVDAAFR |
| 1268.6747 | 1268.674 | −.0007 | −1 | 209 | 219 | FDPVRGEVPPR |
| 1297.6899 | 1297.6924 | .0025 | 2 | 333 | 344 | GGYTLVSGYPKR |
| 1495.6787 | 1495.6833 | .0046 | 3 | 198 | 208 | YYCFQGNQFLR |
| 1495.6787 | 1495.6833 | .0046 | 3 | 198 | 208 | YYCFQGNQFLR |
| 1512.6722 | 1512.6998 | .0276 | 18 | 223 | 234 | DVRDYFMPCPGR |
| 1528.6672 | 1528.6842 | .017 | 11 | 223 | 234 | DVRDYFMPCPGR |
| 1528.6672 | 1528.6842 | .017 | 11 | 223 | 234 | DVRDYFMPCPGR |
| 1534.7802 | 1534.7842 | .004 | 3 | 90 | 102 | WKNFPSPVDAA |
| | | | | | | FR |
| 1712.7698 | 1712.8146 | .0448 | 26 | 152 | 166 | GECQAEGVLFF |
| | | | | | | QGDR |
| 1837.8868 | 1837.9355 | .0487 | 26 | 387 | 402 | SGAQATWTELP |
| | | | | | | WPHEK |
| 2364.1653 | 2364.1904 | .0251 | 11 | 131 | 151 | LLQDEFPGIPSP |
| | | | | | | LDAAVE |
| | | | | | | CHR |
| 2364.1653 | 2364.1904 | .0251 | 11 | 131 | 151 | LLQDEFPGIPSP |
| | | | | | | LDAAVE |
| | | | | | | CHR |
| 2498.2344 | 2498.2678 | .0334 | 13 | 348 | 371 | EVGTPHGIILDSV |
| | | | | | | DAAFIC |
| | | | | | | PGSSR |
| 2498.2344 | 2498.2678 | .0334 | 13 | 348 | 371 | EVGTPHGIILDSV |
| | | | | | | DAAFIC |
| | | | | | | PGSSR |

| | |
|---|---|
| HPX protein [Homo sapiens] | gi\|13529281 |

[0240] Peptide Information

| | Obsrv. | | | Start | | |
|---|---|---|---|---|---|---|
| Calc. Mass | Mass | ±da | ±ppm | Seq. | End Seq. | Sequence |
| 828.4111 | 828.4098 | −.0013 | −2 | 78 | 83 | SHKWDR |
| 1070.5742 | 1070.5739 | −.0003 | 0 | 214 | 222 | GEVPPRYPR |
| 1142.6317 | 1142.6134 | −.0183 | −16 | 103 | 112 | QGHNSVFLIK |
| 1158.4707 | 1158.472 | .0013 | 1 | 226 | 234 | DYFMPCPGR |
| 1158.4707 | 1158.472 | .0013 | 1 | 226 | 234 | DYFMPCPGR |
| 1220.606 | 1220.6074 | .0014 | 1 | 92 | 102 | NFPSPVDAAFR |
| 1220.606 | 1220.6074 | .0014 | 1 | 92 | 102 | NFPSPVDAAFR |
| 1268.6747 | 1268.674 | −.0007 | −1 | 209 | 219 | FDPVRGEVPPR |
| 1495.6787 | 1495.6833 | .0046 | 3 | 198 | 208 | YYCFQGNQFLR |
| 1495.6787 | 1495.6833 | .0046 | 3 | 198 | 208 | YYCFQGNQFLR |
| 1512.6722 | 1512.6998 | .0276 | 18 | 223 | 234 | DVRDYFMPCPGR |
| 1528.6672 | 1528.6842 | .017 | 11 | 223 | 234 | DVRDYFMPCPGR |
| 1528.6672 | 1528.6842 | .017 | 11 | 223 | 234 | DVRDYFMPCPGR |
| 1534.7802 | 1534.7842 | .004 | 3 | 90 | 102 | WKNFPSPVDAA |
| | | | | | | FR |
| 1712.7698 | 1712.8146 | .0448 | 26 | 152 | 166 | GECQAEGVLFF |
| | | | | | | QGDR |
| 2364.1653 | 2364.1904 | .0251 | 11 | 131 | 151 | LLQDEFPGIPSP |
| | | | | | | LDAAVE |
| | | | | | | CHR |
| 2364.1653 | 2364.1904 | .0251 | 11 | 131 | 151 | LLQDEFPGIPSP |
| | | | | | | LDAAVE |
| | | | | | | CHR |

| | |
|---|---|
| hemopexin, isoform CRA_d [Homo sapiens] | gi\|119589127 |

[0241] Peptide Information

| | Obsrv. | | | Start | | |
|---|---|---|---|---|---|---|
| Calc. Mass | Mass | ±da | ±ppm | Seq. | End Seq. | Sequence |
| 813.4399 | 813.4328 | −.0071 | −9 | 301 | 307 | LHIMAGR |
| 828.4111 | 828.4098 | −.0013 | −2 | 78 | 83 | SHKWDR |
| 1129.6517 | 1129.6481 | −.0036 | −3 | 308 | 315 | RLWWLDLK |
| 1141.5889 | 1141.5925 | .0036 | 3 | 262 | 272 | GGYTLVSGYPK |
| 1142.6317 | 1142.6134 | −.0183 | −16 | 103 | 112 | QGHNSVFLIK |
| 1220.606 | 1220.6074 | .0014 | 1 | 92 | 102 | NFPSPVDAAFR |
| 1220.606 | 1220.6074 | .0014 | 1 | 92 | 102 | NFPSPVDAAFR |
| 1297.6899 | 1297.6924 | .0025 | 2 | 262 | 273 | GGYTLVSGYPKR |
| 1534.7802 | 1534.7842 | .004 | 3 | 90 | 102 | WKNFPSPVDAAFR |
| 1837.8868 | 1837.9355 | .0487 | 26 | 316 | 331 | SGAQATWTELPW |
| | | | | | | PHEK |
| 2364.1653 | 2364.1904 | .0251 | 11 | 131 | 151 | LLQDEFPGIPSPL |
| | | | | | | DAAVE |
| | | | | | | CHR |
| 2364.1653 | 2364.1904 | .0251 | 11 | 131 | 151 | LLQDEFPGIPSPL |
| | | | | | | DAAVE |
| | | | | | | CHR |
| 2498.2344 | 2498.2678 | .0334 | 13 | 277 | 300 | EVGTPHGIILDSV |
| | | | | | | DAAFIC |
| | | | | | | PGSSR |
| 2498.2344 | 2498.2678 | .0334 | 13 | 277 | 300 | EVGTPHGIILDSV |
| | | | | | | DAAFIC |
| | | | | | | PGSSR |

| | |
|---|---|
| hemopexin, isoform CRA_c [Homo sapiens] | gi\|119589126 |

[0242] Peptide Information

| | | | | Start | End | |
|---|---|---|---|---|---|---|
| Calc. Mass | Obsrv. Mass | ±da | ±ppm | Seq. | Seq. | Sequence |
| 813.4399 | 813.4328 | −.0071 | −9 | 170 | 176 | LHIMAGR |
| 1129.6517 | 1129.6481 | −.0036 | −3 | 177 | 184 | RLWWLDLK |
| 1141.5889 | 1141.5925 | .0036 | 3 | 131 | 141 | GGYTLVSGYPK |
| 1297.6899 | 1297.6924 | .0025 | 2 | 131 | 142 | GGYTLVSGYPKR |
| 1509.6613 | 1509.719 | .0577 | 38 | 25 | 37 | SQQCLSDQGHG |
| | | | | | | HR |
| 1837.8868 | 1837.9355 | .0487 | 26 | 185 | 200 | SGAQATWTELPW |
| | | | | | | PHEK |
| 2498.2344 | 2498.2678 | .0334 | 13 | 146 | 169 | EVGTPHGIILDSV |
| | | | | | | DAAFIC |
| | | | | | | PGSSR |
| 2498.2344 | 2498.2678 | .0334 | 13 | 146 | 169 | EVGTPHGIILDSVDAAFIC |
| | | | | | | PGSSR |

| | |
|---|---|
| hemopexin, isoform CRA_a [Homo sapiens] | gi\|119589124 |

[0243] Peptide Information

| | | | | Start | End | |
|---|---|---|---|---|---|---|
| Calc. Mass | Obsrv. Mass | ±da | ±ppm | Seq. | Seq. | Sequence |
| 813.4399 | 813.4328 | −.0071 | −9 | 118 | 124 | LHIMAGR |
| 1129.6517 | 1129.6481 | −.0036 | −3 | 125 | 132 | RLWWLDLK |
| 1141.5889 | 1141.5925 | .0036 | 3 | 79 | 89 | GGYTLVSGYPK |
| 1297.6899 | 1297.6924 | .0025 | 2 | 79 | 90 | GGYTLVSGYPKR |
| 1837.8868 | 1837.9355 | .0487 | 26 | 133 | 148 | SGAQATWTELPW |
| | | | | | | PHEK |
| 2498.2344 | 2498.2678 | .0334 | 13 | 94 | 117 | EVGTPHGIILDSV |
| | | | | | | DAAFIC |
| | | | | | | PGSSR |
| 2498.2344 | 2498.2678 | .0334 | 13 | 94 | 117 | EVGTPHGIILDSV |
| | | | | | | DAAFIC |
| | | | | | | PGSSR |

| | |
|---|---|
| hemopexin | gi\|226337 |

[0244] Peptide Information

| Calc. | Obsrv. | | | Start | End | |
|---|---|---|---|---|---|---|
| Mass | Mass | ±da | ±ppm | Seq. | Seq. | Sequence |
| 1141.5889 | 1141.5925 | .0036 | 3 | 78 | 88 | GGYTLVSG |
| | | | | | | YPK |
| 1297.6899 | 1297.6924 | .0025 | 2 | 78 | 89 | GGYTLVSG |
| | | | | | | YPKR |
| 2498.2344 | 2498.2678 | .0334 | 13 | 93 | 116 | EVGTPH |
| | | | | | | GIILDSVD |
| | | | | | | AAFICPG |
| | | | | | | SSR |
| 2498.2344 | 2498.2678 | .0334 | 13 | 93 | 116 | EVGTPH |
| | | | | | | GIILDSVD |
| | | | | | | AAFICPG |
| | | | | | | SSR |

| | |
|---|---|
| unnamed protein product | gi\|221044726 |
| [Homo sapiens] | |

[0245] Peptide Information

| Calc. | Obsrv. | | | Start | End | |
|---|---|---|---|---|---|---|
| Mass | Mass | ±da | ±ppm | Seq. | Seq. | Sequence |
| 828.4111 | 828.4098 | −.0013 | −2 | 78 | 83 | SHKWDR |
| 1142.6317 | 1142.6134 | −.0183 | −16 | 103 | 112 | QGHNSV |
| | | | | | | FLIK |
| 1220.606 | 1220.6074 | .0014 | 1 | 92 | 102 | NFPSPVD |
| | | | | | | AAFR |
| 1220.606 | 1220.6074 | .0014 | 1 | 92 | 102 | NFPSPVD |
| | | | | | | AAFR |

| | |
|---|---|
| cingulin, | gi\|119573820 |
| isoform CRA_b [Homo | |
| sapiens] | |

[0246] Peptide Information

| | | | | Start | | |
|---|---|---|---|---|---|---|
| Calc. Mass | Obsrv. Mass | ±da | ±ppm | Seq. | End Seq. | Sequence |
| 813.4689 | 813.4328 | −.0361 | −44 | 41 | 47 | RPAKDAR |
| 860.4724 | 860.3981 | −.0743 | −86 | 375 | 381 | LDEEVKK |
| 870.4502 | 870.476 | .0258 | 30 | 203 | 209 | MLPPEQR |
| 1129.6324 | 1129.6481 | .0157 | 14 | 357 | 367 | AVAGQGELTRK |
| 1142.6277 | 1142.6134 | −.0143 | −13 | 661 | 670 | LEEAQRGLAR |
| 1158.5209 | 1158.472 | −.0489 | −42 | 2 | 11 | EQAPNMAEPR |
| 1158.5209 | 1158.472 | −.0489 | −42 | 2 | 11 | EQAPNMAEPR |
| 1220.6052 | 1220.6074 | .0022 | 2 | 863 | 872 | TELMQERSAR |
| 1220.6052 | 1220.6074 | .0022 | 2 | 863 | 872 | TELMQERSAR |
| 1373.7384 | 1373.7284 | −.01 | −7 | 548 | 560 | ASAGDTRQVEV |
| | | | | | | LK |
| 1374.7046 | 1374.7214 | .0168 | 12 | 564 | 576 | MVAEAEATVLG |
| | | | | | | QR |
| 1544.7776 | 1544.7524 | −.0252 | −16 | 779 | 792 | QALQASQAERD |
| | | | | | | TAR |
| 1546.8007 | 1546.7771 | −.0236 | −15 | 564 | 577 | MVAEAEATVLG |
| | | | | | | QRR |
| 1837.8676 | 1837.9355 | .0679 | 37 | 993 | 1007 | EVEEQHEVNEQ |
| | | | | | | LQAR |
| 2364.1184 | 2364.1904 | .072 | 30 | 1 | 21 | MEQAPNMAEPR |
| | | | | | | GPVDH |
| | | | | | | GVQIR |
| 2364.1184 | 2364.1904 | .072 | 30 | 1 | 21 | MEQAPNMAEPR |
| | | | | | | GPVDH |
| | | | | | | GVQIR |
| 2392.1562 | 2392.2158 | .0596 | 25 | 294 | 315 | STPDLLRDQQE |
| | | | | | | AAPPGS |
| | | | | | | VDHMK |
| 2497.2505 | 2497.2788 | .0283 | 11 | 301 | 323 | DQQEAAPPGSV |
| | | | | | | DHMKAT |
| | | | | | | IYGILR |

| | |
|---|---|
| cingulin [Homo sapiens] | gi\|16262452 |

[0247] Protein Group

| | |
|---|---|
| Cingulin [Homo sapiens] | gi\|223462553 |
| Cingulin [Homo sapiens] | gi\|156230640 |
| cingulin [Homo sapiens] | gi\|8308176 |
| cingulin [Homo sapiens] | gi\|55959696 |
| cingulin, isoform CRA_a [Homo sapiens] | gi\|119573819 |
| unnamed protein product [Homo sapiens] | gi\|158261037 |

[0248] Peptide Information

| | Obsrv. | | | Start | | |
|---|---|---|---|---|---|---|
| Calc. Mass | Mass | ±da | ±ppm | Seq. | End Seq. | Sequence |
| 813.4689 | 813.4328 | −.0361 | −44 | 41 | 47 | RPAKDAR |
| 860.4724 | 860.3981 | −.0743 | −86 | 375 | 381 | LDEEVKK |
| 870.4502 | 870.476 | .0258 | 30 | 203 | 209 | MLPPEQR |
| 1129.6324 | 1129.6481 | .0157 | 14 | 357 | 367 | AVAGQGELTRK |
| 1142.6277 | 1142.6134 | −.0143 | −13 | 802 | 811 | LEEAQRGLAR |
| 1158.5209 | 1158.472 | −.0489 | −42 | 2 | 11 | EQAPNMAEPR |
| 1158.5209 | 1158.472 | −.0489 | −42 | 2 | 11 | EQAPNMAEPR |
| 1220.6052 | 1220.6074 | .0022 | 2 | 1004 | 1013 | TELMQERSAR |
| 1220.6052 | 1220.6074 | .0022 | 2 | 1004 | 1013 | TELMQERSAR |
| 1373.7384 | 1373.7284 | −.01 | −7 | 619 | 631 | ASAGDTRQVEVLK |
| 1374.7046 | 1374.7214 | .0168 | 12 | 705 | 717 | MVAEAEATVLGQR |
| 1544.7776 | 1544.7524 | −.0252 | −16 | 920 | 933 | QALQASQAERDT |
| | | | | | | AR |
| 1546.8007 | 1546.7771 | −.0236 | −15 | 705 | 718 | MVAEAEATVLGQ |
| | | | | | | RR |
| 1837.8676 | 1837.9355 | .0679 | 37 | 1134 | 1148 | EVEEQHEVNEQL |
| | | | | | | QAR |
| 2364.1184 | 2364.1904 | .072 | 30 | 1 | 21 | MEQAPNMAEPR |
| | | | | | | GPVDH |
| | | | | | | GVQIR |
| 2364.1184 | 2364.1904 | .072 | 30 | 1 | 21 | MEQAPNMAEPR |
| | | | | | | GPVDH |
| | | | | | | GVQIR |
| 2392.1562 | 2392.2158 | .0596 | 25 | 294 | 315 | STPDLLRDQQEA |
| | | | | | | APPGS |
| | | | | | | VDHMK |
| 2497.2505 | 2497.2788 | .0283 | 11 | 301 | 323 | DQQEAAPPGSV |
| | | | | | | DHMKAT |
| | | | | | | IYGILR |

| | |
|---|---|
| CENPE variant protein [Homo sapiens] | gi\|68533047 |

[0249] Peptide Information

| | Obsrv. | | | Start | End | |
|---|---|---|---|---|---|---|
| Calc. Mass | Mass | ±da | ±ppm | Seq. | Seq. | Sequence |
| 860.4472 | 860.3981 | −.0491 | −57 | 1113 | 1119 | SQQLQEK |
| 870.5593 | 870.476 | −.0833 | −96 | 154 | 160 | MKPLIIR |
| 930.489 | 930.4792 | −.0098 | −11 | 1493 | 1500 | QLEAINDK |
| 1084.5707 | 1084.5876 | .0169 | 16 | 635 | 643 | MKELATTYK |
| 1084.5707 | 1084.5876 | .0169 | 16 | 635 | 643 | MKELATTYK |
| 1141.5485 | 1141.5925 | .044 | 39 | 1737 | 1746 | DLEHSNDALK |
| 1142.6641 | 1142.6134 | −.0507 | −44 | 247 | 258 | AAQTGAAGVRLK |
| 1158.5459 | 1158.472 | −.0739 | −64 | 1857 | 1865 | LHENLEEMK |
| 1158.5459 | 1158.472 | −.0739 | −64 | 1857 | 1865 | LHENLEEMK |
| 1177.5696 | 1177.6279 | .0583 | 50 | 551 | 560 | KDQENELSSK |
| 1268.6594 | 1268.674 | .0146 | 12 | 1712 | 1721 | EHQETIDKLR |
| 1373.7272 | 1373.7284 | .0012 | 1 | 1242 | 1253 | TAQIINTQDLEK |
| 1374.6682 | 1374.7214 | .0532 | 39 | 2483 | 2494 | QVTCENSPKSPK |
| 1401.6243 | 1401.7521 | .1278 | 91 | 2078 | 2088 | FEMDFIDEVEK |
| 1438.7649 | 1438.6984 | −.0665 | −46 | 2267 | 2278 | IRELENSLHEAK |
| 1509.802 | 1509.719 | −.083 | −55 | 233 | 246 | VSHLNLVDLAGSER |
| 1517.7264 | 1517.7161 | −.0103 | −7 | 1410 | 1422 | LQESHDEMKSVAK |
| 1528.7853 | 1528.6842 | −.1011 | −66 | 747 | 759 | SEELHIITSEKDK |
| 1528.7853 | 1528.6842 | −.1011 | −66 | 747 | 759 | SEELHIITSEKDK |
| 1534.7748 | 1534.7842 | .0094 | 6 | 2205 | 2217 | SATISKEWEQDLK |
| 1566.801 | 1566.7755 | −.0255 | −16 | 1168 | 1180 | LNENYEEVKSITK |
| 1587.7869 | 1587.7997 | .0128 | 8 | 1857 | 1869 | LHENLEEMKSV |
| | | | | | | MK |
| 1591.7744 | 1591.7181 | −.0563 | −35 | 1784 | 1797 | LSNMQKDLENS |
| | | | | | | NAK |
| 1667.885 | 1667.8221 | −.0629 | −38 | 1447 | 1460 | EIVAKHLETEEE |
| | | | | | | LK |
| 1684.948 | 1684.9039 | −.0441 | −26 | 2294 | 2308 | ELEVTNDIIAKLQ |
| | | | | | | AK |
| 1684.948 | 1684.9039 | −.0441 | −26 | 2294 | 2308 | ELEVTNDIIAKLQ |
| | | | | | | AK |
| 1712.7949 | 1712.8146 | .0197 | 12 | 2151 | 2163 | EMTQFLEEWLN |
| | | | | | | TR |
| 2378.1255 | 2378.207 | .0815 | 34 | 134 | 153 | VSYMEIYNETIT |
| | | | | | | DLLCGT |
| | | | | | | QK |
| 2378.1255 | 2378.207 | .0815 | 34 | 134 | 153 | VSYMEIYNETIT |
| | | | | | | DLLCGT |
| | | | | | | QK |
| 2392.2693 | 2392.2158 | −.0535 | −22 | 233 | 256 | VSHLNLVDLAGS |
| | | | | | | ERAAQ |
| | | | | | | TGAAGVR |
| 2480.1213 | 2480.2493 | .128 | 52 | 783 | 803 | DDLATTQSNYK |
| | | | | | | STDQEF |
| | | | | | | QNFK |
| 2480.1213 | 2480.2493 | .128 | 52 | 783 | 803 | DDLATTQSNYK |
| | | | | | | STDQEF |
| | | | | | | QNFK |

| | |
|---|---|
| hCG1997007 [Homo sapiens] | gi\|119620152 |

[0250] Peptide Information

| Calc. | Obsrv. | | | Start | End | |
|---|---|---|---|---|---|---|
| Mass | Mass | ±da | ±ppm | Seq. | Seq. | Sequence |
| 1141.6266 | 1141.5925 | −.0341 | −30 | 8 | 16 | FHLAPW |
| | | | | | | SRK |
| 1161.6991 | 1161.6335 | −.0656 | −56 | 50 | 59 | FLSTPR |
| | | | | | | TLVK |
| 1438.7339 | 1438.6984 | −.0355 | −25 | 4 | 15 | GPDRFHL |
| | | | | | | APWSR |
| 2378.2212 | 2378.207 | −.0142 | −6 | 17 | 40 | GPVGWA |
| | | | | | | PALSGI |
| | | | | | | PQQEN |
| | | | | | | AAGSSRK |
| 2378.2212 | 2378.207 | −.0142 | −6 | 16 | 39 | KGPVGWA |
| | | | | | | PALSGIP |
| | | | | | | QQENAAG |
| | | | | | | SSR |

| | |
|---|---|
| centromere protein E, 312 kDa, | gi\|119626574 |
| isoform CRA_a [Homo sapiens] | |

[0251] Peptide Information

| | Obsrv. | | | Start | End | |
|---|---|---|---|---|---|---|
| Calc. Mass | Mass | ±da | ±ppm | Seq. | Seq. | Sequence |
| 860.4472 | 860.3981 | −.0491 | −57 | 1133 | 1139 | SQQLQEK |
| 870.5593 | 870.476 | −.0833 | −96 | 149 | 155 | MKPLIIR |
| 930.489 | 930.4792 | −.0098 | −11 | 1513 | 1520 | QLEAINDK |
| 1084.5707 | 1084.5876 | .0169 | 16 | 655 | 663 | MKELATTYK |
| 1084.5707 | 1084.5876 | .0169 | 16 | 655 | 663 | MKELATTYK |
| 1125.5898 | 1125.6086 | .0188 | 17 | 2027 | 2035 | LHESLEEIR |
| 1141.5485 | 1141.5925 | .044 | 39 | 1757 | 1766 | DLEHSNDALK |
| 1142.6641 | 1142.6134 | −.0507 | −44 | 242 | 253 | AAQTGAAGVRLK |
| 1158.5459 | 1158.472 | −.0739 | −64 | 1877 | 1885 | LHENLEEMK |
| 1158.5459 | 1158.472 | −.0739 | −64 | 1877 | 1885 | LHENLEEMK |
| 1268.6594 | 1268.674 | .0146 | 12 | 1732 | 1741 | EHQETIDKLR |
| 1373.7272 | 1373.7284 | .0012 | 1 | 1262 | 1273 | TAQIINTQDLEK |
| 1374.6682 | 1374.7214 | .0532 | 39 | 2563 | 2574 | QVTCENSPKSPK |
| 1401.6243 | 1401.7521 | .1278 | 91 | 2158 | 2168 | FEMDFIDEVEK |
| 1438.7649 | 1438.6984 | −.0665 | −46 | 2347 | 2358 | IRELENSLHEAK |
| 1509.802 | 1509.719 | −.083 | −55 | 228 | 241 | VSHLNLVDLAGS |
| | | | | | | ER |
| 1517.7264 | 1517.7161 | −.0103 | −7 | 1430 | 1442 | LQESHDEMKSV |
| | | | | | | AK |
| 1528.7853 | 1528.6842 | −.1011 | −66 | 767 | 779 | SEELHIITSEKDK |
| 1528.7853 | 1528.6842 | −.1011 | −66 | 767 | 779 | SEELHIITSEKDK |
| 1534.7748 | 1534.7842 | .0094 | 6 | 2285 | 2297 | SATISKEWEQDLK |
| | 1534.7842 | | | | | |
| 1566.801 | 1566.7755 | −.0255 | −16 | 1188 | 1200 | LNENYEEVKSITK |
| 1587.7869 | 1587.7997 | .0128 | 8 | 1877 | 1889 | LHENLEEMKSV |
| | | | | | | MK |
| 1591.7744 | 1591.7181 | −.0563 | −35 | 1804 | 1817 | LSNMQKDLENS |
| | | | | | | NAK |
| 1667.885 | 1667.8221 | −.0629 | −38 | 1467 | 1480 | EIVAKHLETEEE |
| | | | | | | LK |
| 1684.948 | 1684.9039 | −.0441 | −26 | 2374 | 2388 | ELEVTNDIIAKLQ |
| | | | | | | AK |
| 1684.948 | 1684.9039 | −.0441 | −26 | 2374 | 2388 | ELEVTNDIIAKLQ |
| | | | | | | AK |
| 1712.7949 | 1712.8146 | .0197 | 12 | 2231 | 2243 | EMTQFLEEWLN |
| | | | | | | TR |
| 2378.1255 | 2378.207 | .0815 | 34 | 129 | 148 | VSYMEIYNETIT |
| | | | | | | DLLCGT |
| | | | | | | QK |
| 2378.1255 | 2378.207 | .0815 | 34 | 129 | 148 | VSYMEIYNETIT |
| | | | | | | DLLCGT |
| | | | | | | QK |
| 2392.2693 | 2392.2158 | −.0535 | −22 | 228 | 251 | VSHLNLVDLAGS |
| | | | | | | ERAAQ |
| | | | | | | TGAAGVR |
| 2480.1213 | 2480.2493 | .128 | 52 | 803 | 823 | DDLATTQSNYK |
| | | | | | | STDQEF |
| | | | | | | QNFK |
| 2480.1213 | 2480.2493 | .128 | 52 | 803 | 823 | DDLATTQSNYK |
| | | | | | | STDQEF QNFK |

| | |
|---|---|
| centromere protein E, 312 kDa, isoform CRA_b | gi\|119626575 |
| [Homo sapiens] | |

[0252] Peptide Information

| | Obsrv. | | | Start | End | |
|---|---|---|---|---|---|---|
| Calc. Mass | Mass | ±da | ±ppm | Seq. | Seq. | Sequence |
| 860.4472 | 860.3981 | −.0491 | −57 | 1133 | 1139 | SQQLQEK |
| 870.5593 | 870.476 | −.0833 | −96 | 149 | 155 | MKPLIIR |
| 930.489 | 930.4792 | −.0098 | −11 | 1513 | 1520 | QLEAINDK |
| 1084.5707 | 1084.5876 | .0169 | 16 | 655 | 663 | MKELATTYK |
| 1084.5707 | 1084.5876 | .0169 | 16 | 655 | 663 | MKELATTYK |
| 1125.5898 | 1125.6086 | .0188 | 17 | 2027 | 2035 | LHESLEEIR |
| 1141.5485 | 1141.5925 | .044 | 39 | 1757 | 1766 | DLEHSNDALK |
| 1142.6641 | 1142.6134 | −.0507 | −44 | 242 | 253 | AAQTGAAGVRLK |
| 1158.5459 | 1158.472 | −.0739 | −64 | 1877 | 1885 | LHENLEEMK |
| 1158.5459 | 1158.472 | −.0739 | −64 | 1877 | 1885 | LHENLEEMK |
| 1268.6594 | 1268.674 | .0146 | 12 | 1732 | 1741 | EHQETIDKLR |
| 1373.7272 | 1373.7284 | .0012 | 1 | 1262 | 1273 | TAQIINTQDLEK |
| 1374.6682 | 1374.7214 | .0532 | 39 | 2562 | 2573 | QVTCENSPKSPK |
| 1401.6243 | 1401.7521 | .1278 | 91 | 2157 | 2167 | FEMDFIDEVEK |
| 1438.7649 | 1438.6984 | −.0665 | −46 | 2346 | 2357 | IRELENSLHEAK |
| 1509.802 | 1509.719 | −.083 | −55 | 228 | 241 | VSHLNLVDLAGS |
| | | | | | | ER |
| 1517.7264 | 1517.7161 | −.0103 | −7 | 1430 | 1442 | LQESHDEMKSV |
| | | | | | | AK |
| 1528.7853 | 1528.6842 | −.1011 | −66 | 767 | 779 | SEELHIITSEKDK |
| | 1528.6842 | | | | | |
| 1528.7853 | 1528.6842 | −.1011 | −66 | 767 | 779 | SEELHIITSEKDK |
| 1534.7748 | 1534.7842 | .0094 | 6 | 2284 | 2296 | SATISKEWEQDLK |
| 1566.801 | 1566.7755 | −.0255 | −16 | 1188 | 1200 | LNENYEEVKSITK |
| 1587.7869 | 1587.7997 | .0128 | 8 | 1877 | 1889 | LHENLEEMKSV |
| | | | | | | MK |
| 1591.7744 | 1591.7181 | −.0563 | −35 | 1804 | 1817 | LSNMQKDLENS |
| | | | | | | NAK |
| 1667.885 | 1667.8221 | −.0629 | −38 | 1467 | 1480 | EIVAKHLETEEE |
| | | | | | | LK |
| 1684.948 | 1684.9039 | −.0441 | −26 | 2373 | 2387 | ELEVTNDIIAKLQ |
| | | | | | | AK |
| 1684.948 | 1684.9039 | −.0441 | −26 | 2373 | 2387 | ELEVTNDIIAKLQ |
| | | | | | | AK |
| 1712.7949 | 1712.8146 | .0197 | 12 | 2230 | 2242 | EMTQFLEEWLN |
| | | | | | | TR |
| 2378.1255 | 2378.207 | .0815 | 34 | 129 | 148 | VSYMEIYNETIT |
| | | | | | | DLLCGT |
| | | | | | | QK |
| 2378.1255 | 2378.207 | .0815 | 34 | 129 | 148 | VSYMEIYNETIT |
| | | | | | | DLLCGT |
| | | | | | | QK |
| 2392.2693 | 2392.2158 | −.0535 | −22 | 228 | 251 | VSHLNLVDLAGS |
| | | | | | | ERAAQ |
| | | | | | | TGAAGVR |
| 2480.1213 | 2480.2493 | .128 | 52 | 803 | 823 | DDLATTQSNYK |
| | | | | | | STDQEF |
| | | | | | | QNFK |
| 2480.1213 | 2480.2493 | .128 | 52 | 803 | 823 | DDLATTQSNYK |
| | | | | | | STDQEF |
| | | | | | | QNFK |

| | |
|---|---|
| centromere-associated protein E [Homo sapiens] | gi\|71061468 |

[0253] Protein Group

| | |
|---|---|
| RecName: Full = Centromere-associated protein E; | gi\|160358869 |
| AltName: Full = Centromere protein E; | |
| Short = CENP-E; AltName: Full = Kinesin- | |
| related protein CENPE; Flags: | |
| Precursor | |
| centromere protein E, 312 kDa, isoform CRA_c [Homo | gi\|119626576 |
| sapiens] | |
| unnamed protein product [Homo sapiens] | gi\|311641337 |

[0254] Peptide Information

| | Obsrv. | | | Start | End | |
|---|---|---|---|---|---|---|
| Calc. Mass | Mass | ±da | ±ppm | Seq. | Seq. | Sequence |
| 860.4472 | 860.3981 | −.0491 | −57 | 1133 | 1139 | SQQLQEK |
| 870.5593 | 870.476 | −.0833 | −96 | 149 | 155 | MKPLIIR |
| 930.489 | 930.4792 | −.0098 | −11 | 1513 | 1520 | QLEAINDK |
| 1084.5707 | 1084.5876 | .0169 | 16 | 655 | 663 | MKELATTYK |
| 1084.5707 | 1084.5876 | .0169 | 16 | 655 | 663 | MKELATTYK |
| 1125.5898 | 1125.6086 | .0188 | 17 | 2027 | 2035 | LHESLEEIR |
| 1141.5485 | 1141.5925 | .044 | 39 | 1757 | 1766 | DLEHSNDALK |
| 1142.6641 | 1142.6134 | −.0507 | −44 | 242 | 253 | AAQTGAAGVRLK |
| | 1142.6134 | | | | | |
| 1158.5459 | 1158.472 | −.0739 | −64 | 1877 | 1885 | LHENLEEMK |
| 1158.5459 | 1158.472 | −.0739 | −64 | 1877 | 1885 | LHENLEEMK |
| 1268.6594 | 1268.674 | .0146 | 12 | 1732 | 1741 | EHQETIDKLR |
| 1373.7272 | 1373.7284 | .0012 | 1 | 1262 | 1273 | TAQIINTQDLEK |
| 1374.6682 | 1374.7214 | .0532 | 39 | 2599 | 2610 | QVTCENSPKSPK |
| 1401.6243 | 1401.7521 | .1278 | 91 | 2194 | 2204 | FEMDFIDEVEK |
| 1438.7649 | 1438.6984 | −.0665 | −46 | 2383 | 2394 | IRELENSLHEAK |
| 1509.802 | 1509.719 | −.083 | −55 | 228 | 241 | VSHLNLVDLAGS |
| | | | | | | ER |
| 1517.7264 | 1517.7161 | −.0103 | −7 | 1430 | 1442 | LQESHDEMKSV |
| | | | | | | AK |
| 1528.7853 | 1528.6842 | −.1011 | −66 | 767 | 779 | SEELHIITSEKDK |
| 1528.7853 | 1528.6842 | −.1011 | −66 | 767 | 779 | SEELHIITSEKDK |
| 1534.7748 | 1534.7842 | .0094 | 6 | 2321 | 2333 | SATISKEWEQDLK |
| 1566.801 | 1566.7755 | −.0255 | −16 | 1188 | 1200 | LNENYEEVKSITK |
| 1587.7869 | 1587.7997 | .0128 | 8 | 1877 | 1889 | LHENLEEMKSV |
| | | | | | | MK |
| 1591.7744 | 1591.7181 | −.0563 | −35 | 1804 | 1817 | LSNMQKDLENS |
| | | | | | | NAK |
| 1667.885 | 1667.8221 | −.0629 | −38 | 1467 | 1480 | EIVAKHLETEEE |
| | | | | | | LK |
| 1684.948 | 1684.9039 | −.0441 | −26 | 2410 | 2424 | ELEVTNDIIAKLQ |
| | | | | | | AK |
| 1684.948 | 1684.9039 | −.0441 | −26 | 2410 | 2424 | ELEVTNDIIAKLQ |
| | | | | | | AK |
| 1712.7949 | 1712.8146 | .0197 | 12 | 2267 | 2279 | EMTQFLEEWLN |
| | | | | | | TR |
| 2378.1255 | 2378.207 | .0815 | 34 | 129 | 148 | VSYMEIYNETIT |
| | | | | | | DLLCGT |
| | | | | | | QK |
| 2378.1255 | 2378.207 | .0815 | 34 | 129 | 148 | VSYMEIYNETIT |
| | | | | | | DLLCGT |
| | | | | | | QK |
| 2392.2693 | 2392.2158 | −.0535 | −22 | 228 | 251 | VSHLNLVDLAGS |
| | | | | | | ERAAQ |
| | | | | | | TGAAGVR |
| 2480.1213 | 2480.2493 | .128 | 52 | 803 | 823 | DDLATTQSNYK |
| | | | | | | STDQEF |
| | | | | | | QNFK |
| 2480.1213 | 2480.2493 | .128 | 52 | 803 | 823 | DDLATTQSNYK |
| | | | | | | STDQEF QNFK |

| | |
|---|---|
| sorbin and SH3 domain containing 1 [Homo sapiens] | gi\|55957967 |

[0255] Peptide Information

| | Obsrv. | | | Start | End | |
|---|---|---|---|---|---|---|
| Calc. Mass | Mass | ±da | ±ppm | Seq. | Seq. | Sequence |
| 1084.531 | 1084.5876 | .0566 | 52 | 333 | 341 | SIYEYQPGK |
| 1084.531 | 1084.5876 | .0566 | 52 | 333 | 341 | SIYEYQPGK |
| 1158.4984 | 1158.472 | −.0264 | −23 | 280 | 289 | SEMSYIDGEK |
| 1158.4984 | 1158.472 | −.0264 | −23 | 280 | 289 | SEMSYIDGEK |
| 1174.4933 | 1174.5114 | .0181 | 15 | 280 | 289 | SEMSYID |
| | | | | | | GEK |
| 1268.7573 | 1268.674 | −.0833 | −66 | 583 | 593 | AQTLKELP |
| | | | | | | LQK |
| 1297.6127 | 1297.6924 | .0797 | 61 | 26 | 36 | DMDLTKICTGK |
| 1373.6254 | 1373.7284 | .103 | 75 | 278 | 289 | SKSEMSYIDGEK |
| 1477.7645 | 1477.7496 | −.0149 | −10 | 554 | 566 | FGDLLNIDDTAKR |
| 1509.7584 | 1509.719 | −.0394 | −26 | 329 | 341 | AEPKSIYEYQPGK |
| 1546.6769 | 1546.7771 | .1002 | 65 | 308 | 320 | SSSERNDWEPP |
| | | | | | | DK |
| 1591.7671 | 1591.7181 | −.049 | −31 | 478 | 492 | RPSSSASTKDSE |
| | | | | | | SPR |
| 1712.849 | 1712.8146 | −.0344 | −20 | 263 | 277 | YSFSEDTKSPLS |
| | | | | | | VPR |
| 2480.1895 | 2480.2493 | .0598 | 24 | 384 | 404 | DLSLCQTELEAD |
| | | | | | | LEKMET |
| | | | | | | LNK |
| 2480.1895 | 2480.2493 | .0598 | 24 | 384 | 404 | DLSLCQTELEAD |
| | | | | | | LEKMET |
| | | | | | | LNK |
| 2497.0752 | 2497.2788 | .2036 | 82 | 1 | 25 | MSSECDGGSKA |
| | | | | | | VMNGL |
| | | | | | | APGSNGQDK |

| | |
|---|---|
| CDC20-like protein form 3 [Homo sapiens] | gi\|29603480 |

[0256] Peptide Information

| | Obsrv. | | | Start | End | |
|---|---|---|---|---|---|---|
| Calc. Mass | Mass | ±da | ±ppm | Seq. | Seq. | Sequence |
| 813.3672 | 813.4328 | .0656 | 81 | 145 | 151 | APHAMDR |
| 842.4843 | 842.47 | −.0143 | −17 | 5 | 11 | LERTAPR |
| 860.4625 | 860.3981 | −.0644 | −75 | 2 | 7 | EWKLER |
| 930.5255 | 930.4792 | −.0463 | −50 | 123 | 130 | EQLKTPSK |
| 1129.6438 | 1129.6481 | .0043 | 4 | 406 | 414 | ICSLIWLPK |
| 1534.7319 | 1534.7842 | .0523 | 34 | 427 | 439 | NDVTVWTCPTVSR |
| 1550.7268 | 1550.7622 | .0354 | 23 | 131 | 144 | GISETSNSALHFCK |
| 2378.1545 | 2378.207 | .0525 | 22 | 284 | 305 | EGTCLAVGTSEG |
| | | | | | | EVQLW |
| | | | | | | DVVTK |
| 2378.1545 | 2378.207 | .0525 | 22 | 284 | 305 | EGTCLAVGTSEG |
| | | | | | | EVQLW |
| | | | | | | DVVTK |
| 2392.2832 | 2392.2158 | −.0674 | −28 | 208 | 229 | SSGDINDSILQPE |
| | | | | | | VKIHIT |
| | | | | | | GLR |

| | |
|---|---|
| PREDICTED: putative zinc finger protein | gi\|310133350 |
| 705E-like [Homo sapiens] | |

[0257] Peptide Information

| | Obsrv. | | | Start | End | |
|---|---|---|---|---|---|---|
| Calc. Mass | Mass | ±da | ±ppm | Seq. | Seq. | Sequence |
| 811.4785 | 811.3994 | −.0791 | −97 | 108 | 114 | QIHTKGK |
| 995.5156 | 995.5438 | .0282 | 28 | 236 | 244 | AFSLSSDLR |
| 1158.452 | 1158.472 | .02 | 17 | 199 | 207 | WYECDNSGK |
| 1158.452 | 1158.472 | .02 | 17 | 199 | 207 | WYECDNSGK |
| 1193.5579 | 1193.6301 | .0722 | 60 | 1 | 12 | MAAGLSANESSR |
| 1463.7974 | 1463.9257 | .1283 | 88 | 31 | 42 | THMISMHPIIRK |
| 1495.7872 | 1495.6833 | −.1039 | −69 | 31 | 42 | THMISMHPIIRK |
| 1495.7872 | 1495.6833 | −.1039 | −69 | 30 | 41 | KTHMISMHPIIR |
| 2364.0317 | 2364.1904 | .1587 | 67 | 115 | 132 | SYQCNLCEKAY |
| | | | | | | TNCFHLR |
| 2364.0317 | 2364.1904 | .1587 | 67 | 115 | 132 | SYQCNLCEKAY |
| | | | | | | TNCFHL R |

| | |
|---|---|
| sorting nexin-29 [Homo sapiens] | gi\|154091028 |

[0258] Protein Group

| | |
|---|---|
| RecName: Full = Sorting nexin-29 | gi\|156633630 |

[0259] Peptide Information

| | Obsrv. | | | Start | End | |
|---|---|---|---|---|---|---|
| Calc. Mass | Mass | ±da | ±ppm | Seq. | Seq. | Sequence |
| 813.4689 | 813.4328 | −.0361 | −44 | 410 | 416 | LSRGQPR |
| 860.4108 | 860.3981 | −.0127 | −15 | 131 | 137 | VAEQEER |
| 1037.4867 | 1037.5292 | .0425 | 41 | 87 | 95 | QATVAMMNR |
| 1161.5382 | 1161.6335 | .0953 | 82 | 96 | 104 | KDELEEENR |
| 1180.6508 | 1180.5763 | −.0745 | −63 | 159 | 168 | YVGAVQMLKR |
| 1415.804 | 1415.7649 | −.0391 | −28 | 227 | 239 | ALVAKEALVSQMR |
| 1509.7843 | 1509.719 | −.0653 | −43 | 352 | 363 | QLQNYLRSVMNK |
| 1544.8506 | 1544.7524 | −.0982 | −64 | 364 | 377 | VIQMVPEFAASPKK |
| 1555.7533 | 1555.8049 | .0516 | 33 | 108 | 121 | NLLDGEMEHSAA |
| | | | | | | LR |

| | |
|---|---|
| hCG1797938 [Homo sapiens] | gi\|119632137 |

[0260] Peptide Information

| | Obsrv. | | | Start | End | |
|---|---|---|---|---|---|---|
| Calc. Mass | Mass | ±da | ±ppm | Seq. | Seq. | Sequence |
| 1098.5651 | 1098.6075 | .0424 | 39 | 103 | 111 | HRSDIDLSR |
| 1374.6907 | 1374.7214 | .0307 | 22 | 153 | 167 | NGSGKVAGAGLA |
| | | | | | | CGR |
| 1685.0109 | 1684.9039 | −.107 | −64 | 85 | 98 | KKPTENVLIFLINR |
| 1685.0109 | 1684.9039 | −.107 | −64 | 85 | 98 | KKPTENVLIFLINR |
| 1698.7727 | 1698.9124 | .1397 | 82 | 127 | 141 | EACFPGIGGCAEF |
| | | | | | | KR |
| 1712.9078 | 1712.8146 | −.0932 | −54 | 2 | 16 | TSLGAEPIRPWDS |
| | | | | | | RK |
| 2480.1409 | 2480.2493 | .1084 | 44 | 46 | 65 | LCCFTEVGWSQH |
| | | | | | | IMDKE |
| | | | | | | VPK |
| 2480.1409 | 2480.2493 | .1084 | 44 | 46 | 65 | LCCFTEVGWSQH |
| | | | | | | IMDKE |
| | | | | | | VPK |

| | | | |
|---|---|---|---|
| | 42/B15 | | Instr./Gel |
| | | | Origin |
| | [1] Sample Project | | Instrument |
| | 20110503 | | Sample |
| | | | Name |
| Protein Name - | KH9 (SEQ ID NO. KH9) | Accession No. | |

| | |
|---|---|
| unnamed protein product [Homo sapiens] | gi\|1335098 |

[0261] Peptide Information

| | | | | Start | End | |
|---|---|---|---|---|---|---|
| Calc. Mass | Obsrv. Mass | ±da | ±ppm | Seq. | Seq. | Sequence |
| 813.4399 | 813.4381 | −.0018 | −2 | 349 | 355 | LHIMAGR |
| 828.4111 | 828.4168 | .0057 | 7 | 55 | 60 | SHKWDR |
| 1070.5742 | 1070.5767 | .0025 | 2 | 191 | 199 | GEVPPRYPR |
| 1141.5889 | 1141.5946 | .0057 | 5 | 310 | 320 | GGYTLVSGYPK |
| 1142.6317 | 1142.5745 | −.0572 | −50 | 80 | 89 | QGHNSVFLIK |
| 1158.4707 | 1158.4755 | .0048 | 4 | 203 | 211 | DYFMPCPGR |
| 1158.4707 | 1158.4755 | .0048 | 4 | 203 | 211 | DYFMPCPGR |
| 1220.606 | 1220.6096 | .0036 | 3 | 69 | 79 | NFPSPVDAAFR |
| 1220.606 | 1220.6096 | .0036 | 3 | 69 | 79 | NFPSPVDAAFR |
| 1268.6747 | 1268.6786 | .0039 | 3 | 186 | 196 | FDPVRGEVPPR |
| 1297.6899 | 1297.6948 | .0049 | 4 | 310 | 321 | GGYTLVSGYPKR |
| 1495.6787 | 1495.6799 | .0012 | 1 | 175 | 185 | YYCFQGNQFLR |
| 1495.6787 | 1495.6799 | .0012 | 1 | 175 | 185 | YYCFQGNQFLR |
| 1512.6722 | 1512.7058 | .0336 | 22 | 200 | 211 | DVRDYFMPCPGR |
| 1528.6672 | 1528.6815 | .0143 | 9 | 200 | 211 | DVRDYFMPCPGR |
| 1528.6672 | 1528.6815 | .0143 | 9 | 200 | 211 | DVRDYFMPCPGR |
| 1534.7802 | 1534.7838 | .0036 | 2 | 67 | 79 | WKNFPSPVDAAFR |
| 1712.7698 | 1712.8024 | .0326 | 19 | 129 | 143 | GECQAEGVLFFQ |
| | | | | | | GDR |
| 2364.1653 | 2364.1797 | .0144 | 6 | 108 | 128 | LLQDEFPGIPSPL |
| | | | | | | DAAVE |
| | | | | | | CHR |
| 2364.1653 | 2364.1797 | .0144 | 6 | 108 | 128 | LLQDEFPGIPSPL |
| | | | | | | DAAVE |
| | | | | | | CHR |
| 2498.2344 | 2498.2512 | .0168 | 7 | 325 | 348 | EVGTPHGIILDSV |
| | | | | | | DAAFIC |
| | | | | | | PGSSR |
| 2498.2344 | 2498.2512 | .0168 | 7 | 325 | 348 | EVGTPHGIILDSV |
| | | | | | | DAAFIC |
| | | | | | | PGSSR |
| 3282.5195 | 3282.6226 | .1031 | 31 | 389 | 418 | SLGPNSCSANGP |
| | | | | | | GLYLIH |
| | | | | | | GPNLYCYSDVEK |

| | |
|---|---|
| hemopexin, isoform CRA_b [Homo sapiens] | gi\|119589125 |

[0262] Protein Group

| | |
|---|---|
| RecName: Full = Hemopexin; AltName: | gi\|1708182 |
| Full = Beta-1B- | |
| glycoprotein; Flags: | |
| Precursor | |
| hemopexin [Homo sapiens] | gi\|184497 |
| hemopexin precursor [Homo sapiens] | gi\|11321561 |
| hemopexin precursor [Homo sapiens] | gi\|386789 |
| unnamed protein product [Homo sapiens] | gi\|189053897 |
| unnamed protein product [Homo sapiens] | gi\|80747621 |

[0263] Peptide Information

| | Obsrv. | | | Start | End | |
|---|---|---|---|---|---|---|
| Calc. Mass | Mass | ±da | ±ppm | Seq. | Seq. | Sequence |
| 813.4399 | 813.4381 | −.0018 | −2 | 372 | 378 | LHIMAGR |
| 828.4111 | 828.4168 | .0057 | 7 | 78 | 83 | SHKWDR |
| 1070.5742 | 1070.5767 | .0025 | 2 | 214 | 222 | GEVPPRYPR |
| 1141.5889 | 1141.5946 | .0057 | 5 | 333 | 343 | GGYTLVSGYPK |
| 1142.6317 | 1142.5745 | −.0572 | −50 | 103 | 112 | QGHNSVFLIK |
| 1158.4707 | 1158.4755 | .0048 | 4 | 226 | 234 | DYFMPCPGR |
| 1158.4707 | 1158.4755 | .0048 | 4 | 226 | 234 | DYFMPCPGR |
| 1220.606 | 1220.6096 | .0036 | 3 | 92 | 102 | NFPSPVDAAFR |
| 1220.606 | 1220.6096 | .0036 | 3 | 92 | 102 | NFPSPVDAAFR |
| 1268.6747 | 1268.6786 | .0039 | 3 | 209 | 219 | FDPVRGEVPPR |
| 1297.6899 | 1297.6948 | .0049 | 4 | 333 | 344 | GGYTLVSGYPKR |
| 1495.6787 | 1495.6799 | .0012 | 1 | 198 | 208 | YYCFQGNQFLR |
| 1495.6787 | 1495.6799 | .0012 | 1 | 198 | 208 | YYCFQGNQFLR |
| 1512.6722 | 1512.7058 | .0336 | 22 | 223 | 234 | DVRDYFMPCPGR |
| 1528.6672 | 1528.6815 | .0143 | 9 | 223 | 234 | DVRDYFMPCPGR |
| 1528.6672 | 1528.6815 | .0143 | 9 | 223 | 234 | DVRDYFMPCPGR |
| 1534.7802 | 1534.7838 | .0036 | 2 | 90 | 102 | WKNFPSPVDAAFR |
| 1712.7698 | 1712.8024 | .0326 | 19 | 152 | 166 | GECQAEGVLFFQGDR |
| | 1712.8024 | | | | | |
| 2364.1653 | 2364.1797 | .0144 | 6 | 131 | 151 | LLQDEFPGI |
| | | | | | | PSPLDAAVE CHR |
| 2364.1653 | 2364.1797 | .0144 | 6 | 131 | 151 | LLQDEFPGI |
| | | | | | | PSPLDAAVE CHR |
| 2498.2344 | 2498.2512 | .0168 | 7 | 348 | 371 | EVGTPHGIIL |
| | | | | | | DSVDAAFIC |
| | | | | | | PGSSR |
| 2498.2344 | 2498.2512 | .0168 | 7 | 348 | 371 | EVGTPHGIIL |
| | | | | | | DSVDAAFIC |
| | | | | | | PGSSR |
| 3282.5195 | 3282.6226 | .1031 | 31 | 412 | 441 | SLGPNSCSA |
| | | | | | | NGPGLYLIH |
| | | | | | | GPNLYCYSDVEK |

| | |
|---|---|
| HPX protein [Homo sapiens] | gi\|13529281 |

[0264] Peptide Information

| | Obsrv. | | | Start | End | |
|---|---|---|---|---|---|---|
| Calc. Mass | Mass | ±da | ±ppm | Seq. | Seq. | Sequence |
| 828.4111 | 828.4168 | .0057 | 7 | 78 | 83 | SHKWDR |
| 1070.5742 | 1070.5767 | .0025 | 2 | 214 | 222 | GEVPPRYPR |
| 1142.6317 | 1142.5745 | −.0572 | −50 | 103 | 112 | QGHNSVFLIK |
| 1158.4707 | 1158.4755 | .0048 | 4 | 226 | 234 | DYFMPCPGR |
| 1158.4707 | 1158.4755 | .0048 | 4 | 226 | 234 | DYFMPCPGR |
| 1220.606 | 1220.6096 | .0036 | 3 | 92 | 102 | NFPSPVDAAFR |
| 1220.606 | 1220.6096 | .0036 | 3 | 92 | 102 | NFPSPVDAAFR |
| 1268.6747 | 1268.6786 | .0039 | 3 | 209 | 219 | FDPVRGEVPPR |
| 1495.6787 | 1495.6799 | .0012 | 1 | 198 | 208 | YYCFQGNQFLR |
| 1495.6787 | 1495.6799 | .0012 | 1 | 198 | 208 | YYCFQGNQFLR |
| 1512.6722 | 1512.7058 | .0336 | 22 | 223 | 234 | DVRDYFMPCPGR |
| 1528.6672 | 1528.6815 | .0143 | 9 | 223 | 234 | DVRDYFMPCPGR |
| 1528.6672 | 1528.6815 | .0143 | 9 | 223 | 234 | DVRDYFMPCPGR |
| 1534.7802 | 1534.7838 | .0036 | 2 | 90 | 102 | WKNFPSPVDAAFR |
| 1712.7698 | 1712.8024 | .0326 | 19 | 152 | 166 | GECQAEGVLFFQ |
| | | | | | | GDR |
| 2364.1653 | 2364.1797 | .0144 | 6 | 131 | 151 | LLQDEFPGIPSPL |
| | | | | | | DAAVE |
| | | | | | | CHR |
| 2364.1653 | 2364.1797 | .0144 | 6 | 131 | 151 | LLQDEFPGIPSPL |
| | | | | | | DAAVE |
| | | | | | | CHR |

| | |
|---|---|
| hemopexin, isoform CRA_d [Homo sapiens] | gi\|119589127 |

[0265] Peptide Information

| | | | | Start | End | |
|---|---|---|---|---|---|---|
| Calc. Mass | Obsrv. Mass | ±da | ±ppm | Seq. | Seq. | Sequence |
| 813.4399 | 813.4381 | −.0018 | −2 | 301 | 307 | LHIMAGR |
| 828.4111 | 828.4168 | .0057 | 7 | 78 | 83 | SHKWDR |
| 1141.5889 | 1141.5946 | .0057 | 5 | 262 | 272 | GGYTLVSGYPK |
| 1142.6317 | 1142.5745 | −.0572 | −50 | 103 | 112 | QGHNSVFLIK |
| 1220.606 | 1220.6096 | .0036 | 3 | 92 | 102 | NFPSPVDAAFR |
| 1220.606 | 1220.6096 | .0036 | 3 | 92 | 102 | NFPSPVDAAFR |
| 1297.6899 | 1297.6948 | .0049 | 4 | 262 | 273 | GGYTLVSGYPKR |
| 1534.7802 | 1534.7838 | .0036 | 2 | 90 | 102 | WKNFPSPVDAA |
| | | | | | | FR |
| 2364.1653 | 2364.1797 | .0144 | 6 | 131 | 151 | LLQDEFPGIPSP |
| | | | | | | LDAAVE |
| | | | | | | CHR |
| 2364.1653 | 2364.1797 | .0144 | 6 | 131 | 151 | LLQDEFPGIPSP |
| | | | | | | LDAAVE |
| | | | | | | CHR |
| 2498.2344 | 2498.2512 | .0168 | 7 | 277 | 300 | EVGTPHGIILDSV |
| | | | | | | DAAFIC |
| | | | | | | PGSSR |
| 2498.2344 | 2498.2512 | .0168 | 7 | 277 | 300 | EVGTPHGIILDSV |
| | | | | | | DAAFIC |
| | | | | | | PGSSR |
| 3282.5195 | 3282.6226 | .1031 | 31 | 341 | 370 | SLGPNSCSANGPGLYLIH |
| | | | | | | GPNLYCYSDVEK |

| | |
|---|---|
| hemopexin, isoform CRA_a [Homo sapiens] | gi\|119589124 |

[0266] Peptide Information

| | | | | Start | End | |
|---|---|---|---|---|---|---|
| Calc. Mass | Obsrv. Mass | ±da | ±ppm | Seq. | Seq. | Sequence |
| 813.4399 | 813.4381 | −.0018 | −2 | 118 | 124 | LHIMAGR |
| 1141.5889 | 1141.5946 | .0057 | 5 | 79 | 89 | GGYTLVSGYPK |
| 1297.6899 | 1297.6948 | .0049 | 4 | 79 | 90 | GGYTLVSGYPKR |
| 2498.2344 | 2498.2512 | .0168 | 7 | 94 | 117 | EVGTPHGIILDSV |
| | | | | | | DAAFIC |
| | | | | | | PGSSR |
| 2498.2344 | 2498.2512 | .0168 | 7 | 94 | 117 | EVGTPHGIILDSV |
| | | | | | | DAAFIC |
| | | | | | | PGSSR |
| 3282.5195 | 3282.6226 | .1031 | 31 | 158 | 187 | SLGPNSCSANGP |
| | | | | | | GLYLIH |
| | | | | | | GPNLYCYSDVEK |

| | |
|---|---|
| hemopexin, isoform CRA_c [Homo sapiens] | gi\|119589126 |

[0267] Peptide Information

| | | | | Start | End | |
|---|---|---|---|---|---|---|
| Calc. Mass | Obsrv. Mass | ±da | ±ppm | Seq. | Seq. | Sequence |
| 813.4399 | 813.4381 | −.0018 | −2 | 170 | 176 | LHIMAGR |
| 1141.5889 | 1141.5946 | .0057 | 5 | 131 | 141 | GGYTLVSGYPK |
| 1297.6899 | 1297.6948 | .0049 | 4 | 131 | 142 | GGYTLVSGYPKR |
| 2498.2344 | 2498.2512 | .0168 | 7 | 146 | 169 | EVGTPHGIILDSV |
| | | | | | | DAAFIC |
| | | | | | | PGSSR |
| 2498.2344 | 2498.2512 | .0168 | 7 | 146 | 169 | EVGTPHGIILDSV |
| | | | | | | DAAFIC |
| | | | | | | PGSSR |
| 3282.5195 | 3282.6226 | .1031 | 31 | 210 | 239 | SLGPNSCSANGP |
| | | | | | | GLYLIH |
| | | | | | | GPNLYCYSDVEK |

| | |
|---|---|
| hemopexin | gi\|226337 |

[0268] Peptide Information

| | | | | Start | End | |
|---|---|---|---|---|---|---|
| Calc. Mass | Obsrv. Mass | ±da | ±ppm | Seq. | Seq. | Sequence |
| 1141.5889 | 1141.5946 | .0057 | 5 | 78 | 88 | GGYTLVSGYPK |
| 1297.6899 | 1297.6948 | .0049 | 4 | 78 | 89 | GGYTLVSGYPKR |
| 2498.2344 | 2498.2512 | .0168 | 7 | 93 | 116 | EVGTPHGIILDSV |
| | | | | | | DAAFIC |
| | | | | | | PGSSR |
| 2498.2344 | 2498.2512 | .0168 | 7 | 93 | 116 | EVGTPHGIILDSV |
| | | | | | | DAAFIC |
| | | | | | | PGSSR |

| | |
|---|---|
| unnamed protein product [Homo sapiens] | gi\|221044726 |

[0269] Peptide Information

| | | | | Start | End | |
|---|---|---|---|---|---|---|
| Calc. Mass | Obsrv. Mass | ±da | ±ppm | Seq. | Seq. | Sequence |
| 828.4111 | 828.416 | .0057 | 7 | 7 | 83 | SHKWDR |
| 1142.6317 | 1142.574 | −.0572 | — | 10 | 11 | QGHNSVFLIK |
| 1220.606 | 1220.609 | .0036 | 3 | 9 | 10 | NFPSPVDAAFR |
| 1220.606 | 1220.609 | .0036 | 3 | 9 | 10 | NFPSPVDAAFR |

| | |
|---|---|
| cytotoxic ligand TRAIL receptor [Homo sapiens] | gi\|1945072 |

[0270] Protein Group

| | |
|---|---|
| tumor necrosis factor receptor superfamily, member | gi\|119584040 |
| 10a | |
| [Homo sapiens] | |
| unnamed protein product [Homo sapiens] | gi\|158256034 |
| unnamed protein product [Homo sapiens] | gi\|112186609 |
| unnamed protein product [Homo sapiens] | gi\|29563434 |

[0271] Peptide Information

| | Obsrv. | | | Start | End | |
|---|---|---|---|---|---|---|
| Calc. Mass | Mass | ±da | ±ppm | Seq. | Seq. | Sequence |
| 828.4686 | 828.4168 | −.0518 | −63 | 81 | 87 | EASPRLR |
| 841.4639 | 841.4127 | −.0512 | −61 | 45 | 52 | IEPRGGGR |
| 860.4737 | 860.4071 | −.0666 | −77 | 415 | 421 | WVNKTGR |
| 900.4355 | 900.4484 | .0129 | 14 | 435 | 441 | MEERHAK |
| 1268.5544 | 1268.6786 | .1242 | 98 | 207 | 217 | CSTGCPRGMVK |
| | 1268.6786 | | | | | |
| 1566.7655 | 1566.7692 | .0037 | 2 | 399 | 414 | AGTAGPGDALYAMLMK |
| 2364.2268 | 2364.1797 | −.0471 | −20 | 350 | 370 | RLLVPANG |
| | | | | | | ADPTETLMLF |
| | | | | | | FDK |
| 2364.2268 | 2364.1797 | −.0471 | −20 | 350 | 370 | RLLVPANG |
| | | | | | | ADPTETLMLF |
| | | | | | | FDK |
| 2392.2 | 2392.2051 | .0051 | 2 | 392 | 414 | NEIDVVRA |
| | | | | | | GTAGPGDALY |
| | | | | | | AMLMK |
| 3282.7229 | 3282.6226 | −.1003 | −31 | 2 | 36 | APPPARVHLGAFLAVTPN |
| | | | | | | PGSAASGTEAAAATPSK |

| | |
|---|---|
| hCG28655 [8 Homo sapiens] | gi\|119623000 |

[0272] Peptide Information

| | | | | Start | End | |
|---|---|---|---|---|---|---|
| Calc. Mass | Obsrv. Mass | ±da | ±ppm | Seq. | Seq. | Sequence |
| 828.3774 | 828.4168 | .0394 | 48 | 551 | 556 | QFLEYE |
| 841.4566 | 841.4127 | −.0439 | −52 | 268 | 274 | SPHIPYK |
| 995.4833 | 995.5543 | .071 | 71 | 176 | 183 | FSTWEPTK |
| 1070.5854 | 1070.5767 | −.0087 | −8 | 120 | 128 | HIHEHAKAK |
| 1220.6997 | 1220.6096 | −.0901 | −74 | 185 | 194 | ELELLKHNPK |
| 1220.6997 | 1220.6096 | −.0901 | −74 | 185 | 194 | ELELLKHNPK |
| 1229.7113 | 1229.8269 | .1156 | 94 | 27 | 38 | AFATIGVPARAR |
| 1325.7762 | 1325.8303 | .0541 | 41 | 431 | 441 | KLPIVACFHLK |
| 1544.8656 | 1544.744 | −.1216 | −79 | 2 | 16 | SVAPSSPHAALV |
| | | | | | | RPR |
| 1684.7418 | 1684.8979 | .1561 | 93 | 412 | 425 | IKCSGCHSYQES |
| | | | | | | TK |
| 1684.7418 | 1684.8979 | .1561 | 93 | 412 | 425 | IKCSGCHSYQES |
| | | | | | | TK |
| 1698.8374 | 1698.9072 | .0698 | 41 | 537 | 550 | DVLDSEGYLLFY |
| | | | | | | HK |
| 2378.1658 | 2378.1941 | .0283 | 12 | 453 | 473 | ITTYVSFPLELD |
| | | | | | | MTPFMA |
| | | | | | | SSK |
| 2378.1658 | 2378.1941 | .0283 | 12 | 453 | 473 | ITTYVSFPLELD |
| | | | | | | MTPFMA |
| | | | | | | SSK |

| | |
|---|---|
| chromosome 10 open reading frame 68 | gi\|168985097 |
| [Homo sapiens] | |

[0273] Protein Group

| | |
|---|---|
| C10orf68 protein [Homo sapiens] | gi\|115528720 |
| chromosome 10 open reading frame 68 [Homo sapiens] | gi\|168984617 |
| chromosome 10 open reading frame 68 [Homo sapiens] | gi\|168984251 |
| chromosome 10 open reading frame 68 [Homo sapiens] | gi\|168984530 |

[0274] Peptide Information

| | | | | Start | End | |
|---|---|---|---|---|---|---|
| Calc. Mass | Obsrv. Mass | ±da | ±ppm | Seq. | Seq. | Sequence |
| 800.3897 | 800.4257 | .036 | 45 | 116 | 122 | HQDSVSK |
| 807.4207 | 807.3802 | −.0405 | −50 | 236 | 242 | SESQTKK |
| 813.4213 | 813.4381 | .0168 | 21 | 390 | 396 | GHQKTDK |
| 828.4686 | 828.4168 | −.0518 | −63 | 164 | 170 | ITPGRER |
| 830.473 | 830.392 | −.081 | −98 | 382 | 389 | GSINAQLK |
| 832.3618 | 832.3807 | .0189 | 23 | 79 | 85 | HQDSMSK |
| 1161.5746 | 1161.6329 | .0583 | 50 | 303 | 312 | SKSLPETDER |
| 1174.5885 | 1174.5157 | −.0728 | −62 | 1 | 12 | MVPASASGEGLR |
| 1268.6846 | 1268.6786 | −.006 | −5 | 38 | 48 | LVVEHQESLSK |
| 1282.7729 | 1282.688 | −.0849 | −66 | 462 | 473 | DIIKGPISAQLK |
| 1534.6989 | 1534.7838 | .0849 | 55 | 79 | 91 | HQDSMSKSEMQ |
| | | | | | | VK |
| 1566.7694 | 1566.7692 | −.0002 | 0 | 513 | 525 | DMSVQRQEG |
| 1712.816 | 1712.8024 | −.0136 | −8 | 101 | 115 | IITHDEESGE |

| | |
|---|---|
| pre-progastrin releasing peptide [Homo sapiens] | gi\|306807 |

[0275] Peptide Information

| | | | | Start | End | |
|---|---|---|---|---|---|---|
| Calc. Mass | Obsrv. Mass | ±da | ±ppm | Seq. | Seq. | Sequence |
| 815.437 | 815.4804 | .0434 | 53 | 131 | 138 | LSAPGSQR |
| 841.4162 | 841.4127 | −.0035 | −4 | 142 | 148 | NPQLNQQ |
| 1125.5018 | 1125.6086 | .1068 | 95 | 54 | 64 | STGESSSVSER |
| 1510.7344 | 1510.6847 | −.0497 | −33 | 54 | 68 | STGESSSVSERG |
| | | | | | | SLK |
| 1712.933 | 1712.8024 | −.1306 | −76 | 77 | 91 | WEEAARNLLGLIE |
| | | | | | | AK |
| 2496.1274 | 2496.2483 | .1209 | 48 | 103 | 125 | ALGNQQPSWDSE |
| | | | | | | DSSNF |
| | | | | | | KDVGSK |

| | |
|---|---|
| hypothetical protein [Homo sapiens] | gi\|50949374 |

[0276] Peptide Information

| | | | | Start | End | |
|---|---|---|---|---|---|---|
| Calc. Mass | Obsrv. Mass | ±da | ±ppm | Seq. | Seq. | Sequence |
| 800.358 | 800.4257 | .0677 | 85 | 39 | 44 | DGRCHR |
| 856.525 | 856.4572 | −.0678 | −79 | 11 | 17 | LLETRPK |
| 1161.58 | 1161.6329 | .0529 | 46 | 3 | 10 | RDTLWWER |
| | 1161.6329 | | | | | |
| 1712.8789 | 1712.8024 | −.0765 | −45 | 71 | 87 | GFIAPCPGSPLG |
| | | | | | | SPSLR |
| 2480.2537 | 2480.248 | −.0057 | −2 | 64 | 87 | LPGPCSRGFIAP |
| | | | | | | CPGSPL |
| | | | | | | GSPSLR |
| 2480.2537 | 2480.248 | −.0057 | −2 | 64 | 87 | LPGPCSRGFIAP |
| | | | | | | CPGSPL |
| | | | | | | GSPSLR |

| | |
|---|---|
| immunoglobulin heavy chain variable region [Homo | gi\|3832687 |
| sapiens] | |

[0277] Peptide Information

| | | | | Start | End | |
|---|---|---|---|---|---|---|
| Calc. Mass | Obsrv. Mass | ±da | ±ppm | Seq. | Seq. | Sequence |
| 800.3613 | 800.4257 | .0644 | 80 | 98 | 103 | YFDLWG |
| 830.4519 | 830.392 | −.0599 | −72 | 33 | 39 | GLEWIGR |
| 1220.6416 | 1220.6096 | −.032 | −26 | 87 | 97 | DSSITMVRGVR |
| 1220.6416 | 1220.6096 | −.032 | −26 | 87 | 97 | DSSITMVRGVR |
| 1544.7592 | 1544.744 | −.0152 | −10 | 40 | 53 | IYTSGSTNYNPSLK |
| 1684.8575 | 1684.8979 | .0404 | 24 | 56 | 70 | VTMSVDTSKNQF |
| | | | | | | SLK |
| 1684.8575 | 1684.8979 | .0404 | 24 | 56 | 70 | VTMSVDTSKNQF |
| | | | | | | SLK |

RecName: Full = Gastrin-releasing peptide; Short = GRP;
Contains: RecName: Full = Neuromedin-C; AltName:
Full = GRP-10; Flags: Precursor

[0278] Protein Group

| | |
|---|---|
| | gi\|308153451 |
| Gastrin-releasing peptide [Homo sapiens] | gi\|13325358 |
| gastrin-releasing peptide [Homo sapiens] | gi\|30582445 |
| gastrin-releasing peptide isoform 1 preproprotein | gi\|31542860 |
| [Homo sapiens] | |
| gastrin-releasing peptide, isoform CRA_a [Homo | gi\|119583495 |
| sapiens] | |

[0279] Peptide Information

| | | | | Start | End | |
|---|---|---|---|---|---|---|
| Calc. Mass | Obsrv. Mass | ±da | ±ppm | Seq. | Seq. | Sequence |
| 815.437 | 815.4804 | .0434 | 53 | 131 | 138 | LSAPGSQR |
| 841.4162 | 841.4127 | −.0035 | −4 | 142 | 148 | NPQLNQQ |
| 1125.5018 | 1125.6086 | .1068 | 95 | 54 | 64 | STGESSSVSER |
| | 1125.6086 | | | | | |
| 1510.7344 | 1510.6847 | −.0497 | −33 | 54 | 68 | STGESSSVSERG |
| | | | | | | SLK |
| 1712.933 | 1712.8024 | −.1306 | −76 | 77 | 91 | WEEAARNLLGLI |
| | | | | | | EAK |
| 2496.1274 | 2496.2483 | .1209 | 48 | 103 | 125 | ALGNQQPSWDS |
| | | | | | | EDSSNF |
| | | | | | | KDVGSK |

| | |
|---|---|
| PREDICTED: putative zinc finger protein | gi\|310133350 |
| 705E-like [Homo sapiens] | |

[0280] Peptide Information

| | | | | Start | | |
|---|---|---|---|---|---|---|
| Calc. Mass | Obsrv. Mass | ±da | ±ppm | Seq. | End Seq. | Sequence |
| 811.4785 | 811.4168 | −.0617 | −76 | 108 | 114 | QIHTKGK |
| 995.5156 | 995.5543 | .0387 | 39 | 236 | 244 | AFSLSSDLR |
| 1158.452 | 1158.4755 | .0235 | 20 | 199 | 207 | WYECDNSGK |
| 1158.452 | 1158.4755 | .0235 | 20 | 199 | 207 | WYECDNSGK |
| 1193.5579 | 1193.6306 | .0727 | 61 | 1 | 12 | MAAGLSANESSR |
| 1495.7872 | 1495.6799 | −.1073 | −72 | 31 | 42 | THMISMHPIIRK |
| 1495.7872 | 1495.6799 | −.1073 | −72 | 30 | 41 | KTHMISMHPIIR |
| 2364.0317 | 2364.1797 | .148 | 63 | 115 | 132 | SYQCNLCEKAYT |
| | | | | | | NCFHLR |
| 2364.0317 | 2364.1797 | .148 | 63 | 115 | 132 | SYQCNLCEKAYT |
| | | | | | | NCFHLR |

| | |
|---|---|
| tumor necrosis factor receptor superfamily member | gi\|226201419 |
| 10a | |
| [Homo sapiens] | |

[0281] Peptide Information

| | Obsrv. | | | Start | | |
|---|---|---|---|---|---|---|
| Calc. Mass | Mass | ±da | ±ppm | Seq. | End Seq. | Sequence |
| 828.4686 | 828.4168 | −.0518 | −63 | 80 | 86 | EASPRLR |
| 841.4639 | 841.4127 | −.0512 | −61 | 44 | 51 | IEPRGGGR |
| 860.4737 | 860.4071 | −.0666 | −77 | 414 | 420 | WVNKTGR |
| 900.4355 | 900.4484 | .0129 | 14 | 434 | 440 | MEERHAK |
| 1566.7655 | 1566.7692 | .0037 | 2 | 398 | 413 | AGTAGPGDALYA |
| | | | | | | MLMK |
| 2364.2268 | 2364.1797 | −.0471 | −20 | 349 | 369 | RLLVPANGADPT |
| | | | | | | ETLMLF |
| | | | | | | FDK |
| 2364.2268 | 2364.1797 | −.0471 | −20 | 349 | 369 | RLLVPANGADPT |
| | | | | | | ETLMLF |
| | | | | | | FDK |
| 2392.2 | 2392.2051 | .0051 | 2 | 391 | 413 | NEIDVVRAGTAGP |
| | | | | | | GDALY |
| | | | | | | AMLMK |
| 3282.7229 | 3282.6226 | −.1003 | −31 | 1 | 35 | APPPARVHLGAFL |
| | | | | | | AVTPN |
| | | | | | | PGSAASGTEAAA |
| | | | | | | ATPSK |

| | |
|---|---|
| Tumor necrosis factor receptor | gi\|15277527 |
| superfamily, member 10a [Homo sapiens] | |

[0282] Protein Group

| | |
|---|---|
| tumor necrosis factor receptor superfamily, member | gi\|117606478 |
| 10a | |
| [Homo sapiens] | |
| tumor necrosis factor receptor superfamily, member | gi\|30582651 |
| 10a | |
| [Homo sapiens] | |
| unnamed protein product [Homo sapiens] | gi\|238803394 |
| unnamed protein product [Homo sapiens] | gi\|218101354 |

[0283] Peptide Information

| | | | | Start | End | |
|---|---|---|---|---|---|---|
| Calc. Mass | Obsrv. Mass | ±da | ±ppm | Seq. | Seq. | Sequence |
| 828.4686 | 828.4168 | −.0518 | −63 | 81 | 87 | EASPRLR |
| 841.4639 | 841.4127 | −.0512 | −61 | 45 | 52 | IEPRGGGR |
| 860.4737 | 860.4071 | −.0666 | −77 | 415 | 421 | WVNKTGR |
| 900.4355 | 900.4484 | .0129 | 14 | 435 | 441 | MEERHAK |
| 1566.7655 | 1566.7692 | .0037 | 2 | 399 | 414 | AGTAGPGDALYA |
| | | | | | | MLMK |
| 2364.2268 | 2364.1797 | −.0471 | −20 | 350 | 370 | RLLVPANGADPT |
| | | | | | | ETLMLF |
| | | | | | | FDK |
| 2364.2268 | 2364.1797 | −.0471 | −20 | 350 | 370 | RLLVPANGADPT |
| | | | | | | ETLMLF |
| | | | | | | FDK |
| 2392.2 | 2392.2051 | .0051 | 2 | 392 | 414 | NEIDVVRAGTAGP |
| | | | | | | GDALY |
| | | | | | | AMLMK |
| 3282.7229 | 3282.6226 | −.1003 | −31 | 2 | 36 | APPPARVHLGAFLAVTPN |
| | | | | | | PGSAASGTEAAAATPSK |

| | |
|---|---|
| RecName: Full = NADH dehydrogenase [ubiquinone] 1 | gi\|6093488 |
| alpha subcomplex subunit 2; AltName: Full = Complex | |
| I-B8; Short = CI-B8; AltName: Full = NADH-ubiquinone | |
| oxidoreductase B8 subunit | |
| CD14 [Homo sapiens] | gi\|48146149 |

[0284] Protein Group

| | |
|---|---|
| NADH dehydrogenase (ubiquinone) 1 alpha | gi\|12539408 |
| subcomplex 2 [Homo sapiens] | |
| NADH dehydrogenase (ubiquinone) 1 alpha | gi\|13277540 |
| subcomplex, 2, 8 kDa [Homo sapiens] | |
| NADH dehydrogenase (ubiquinone) 1 alpha | gi\|119582435 |
| subcomplex, 2, 8 kDa [Homo sapiens] | |
| NADH dehydrogenase | gi\|4505355 |
| [ubiquinone] 1 alpha | |
| sapiens] | |
| NADH-ubiquinone oxidoreductase | gi\|2909862 |
| sapiens] | |

[0285] Peptide Information

| | | | | | End | |
|---|---|---|---|---|---|---|
| Calc. Mass | Obsrv. | ±da | ±ppm | Star Seq. | Seq. | Sequence |
| 807.4359 | 807.3802 | −.0557 | −69 | 35 | 40 | DFIEKR |
| 856.5363 | 856.4572 | −.0791 | −92 | 14 | 20 | LGLREIR |
| 870.5519 | 870.4911 | −.0608 | −70 | 9 | 17 | GVGAKLGLR |
| 930.5255 | 930.4865 | −.039 | −42 | 90 | 98 | ALENVLSGK |
| 3282.6389 | 3282.6226 | −.0163 | −5 | 69 | 98 | YAFGQETNVPLN |
| | | | | | | NFSAD |
| | | | | | | QVTRALENVLSGK |

| | |
|---|---|
| Chain A, Nmr Solution Structure Of Subunit | gi\|60593462 |
| B8 From | |
| Human Nadh-Ubiquinone Oxidoreductase | |
| Complex I | |
| (Ci-B8) | |

[0286] Peptide Information

| | Obsrv. | | | Start | | |
|---|---|---|---|---|---|---|
| Calc. Mass | Mass | ±da | ±ppm | Seq. | End Seq. | Sequence |
| 807.4359 | 807.3802 | −.0557 | −69 | 38 | 43 | DFIEKR |
| 856.5363 | 856.4572 | −.0791 | −92 | 17 | 23 | LGLREIR |
| 870.5519 | 870.4911 | −.0608 | −70 | 12 | 20 | GVGAKLGLR |
| 930.5255 | 930.4865 | −.039 | −42 | 93 | 101 | ALENVLSGK |
| 3282.6389 | 3282.6226 | −.0163 | −5 | 72 | 101 | YAFGQETNVPLN |
| | | | | | | NFSAD |
| | | | | | | QVTRALENVLSGK |

| | | | |
|---|---|---|---|
| | 43/B16 | | Instr./Gel |
| | | | Origin |
| | [1] Sample Project | | Instrument |
| | 20110503 | | Sample |
| | | | Name |
| Protein Name - | KH10 (SEQ ID NO. KH10) | Accession No. | |

| | |
|---|---|
| unnamed protein product [Homo sapiens] | gi\|311078934 |

[0287] Protein Group

| | |
|---|---|
| Chain A, Antithrombin-Anhydrothrombin-Heparin | gi\|52695555 |
| Ternary Complex Structure | |
| Chain A, Crystal Structure Of A Domain-Swapped | gi\|209870303 |
| Serpin Dimer | |
| Chain A, The Intact And Cleaved Human Antithrombin | gi\|999513 |
| Iii Complex As A Model For Serpin-Proteinase | |
| Interactions | |
| Chain B, Crystal Structure Of A Domain-Swapped | gi\|209870304 |
| Serpin Dimer | |
| Chain B, The Intact And Cleaved Human Antithrombin | gi\|157838181 |
| Iii Complex As A Model For Serpin-Proteinase | |
| Interactions | |
| Chain I, AntithrombinPENTASACCHARIDE | gi\|4389345 |
| COMPLEX | |
| Chain I, Biological Implications Of A 3 Angstroms | gi\|1000040 |
| Structure Of Dimeric Antithrombin | |
| Chain I, Crystal Structure At 2.6a Of The Ternary | gi\|31615461 |
| Complex Between Antithrombin, A P14-P8 Reactive | |
| Loop Peptide, And An Exogenous Tetrapeptide | |
| Chain I, Crystal Structure Of Antithrombin In The | gi\|37926953 |
| Pentasaccharide-Bound Intermediate | |
| State | |
| Chain I, Crystal Structure Of The Antithrombin-Factor | gi\|285803494 |
| Ixa-Pentasaccharide Complex | |
| Chain I, Implications For Function And Therapy Of A | gi\|6729898 |
| 2.9a Structure Of Binary-Complexed Antithrombin | |
| Chain I, Intermediate Structure Of Antithrombin Bound | gi\|209870630 |
| To The Natural Pentasaccharide | |
| Chain I, Plasma Alpha Antithrombin-Iii | gi\|8569312 |
| Chain I, Plasma Alpha Antithrombin-Iii | gi\|8569308 |
| And | |
| Pentasaccharide | |
| Chain I, Plasma Beta Antithrombin-Iii | gi\|8569310 |
| Chain I, Structure Of Dimeric Antithrombin Complexed | gi\|31615500 |
| With A P14-P9 Reactive Loop Peptide And An | |
| Exogenous Tripeptide | |
| Chain I, Structure Of Dimeric Antithrombin Complexed | gi\|55669596 |
| With A P14-P9 Reactive Loop Peptide And An | |
| Exogenous Tripeptide (Formyl-Norleucine-Lf) | |
| Chain I, The 2.6 A Structure Of Antithrombin Indicates | gi\|2392668 |
| A Conformational Change At The Heparin Binding Site | |
| Chain L, AntithrombinPENTASACCHARIDE | gi\|4389346 |
| COMPLEX | |
| Chain L, Biological Implications Of A 3 Angstroms | gi\|1000039 |
| Structure Of Dimeric Antithrombin | |
| Chain L, Crystal Structure At 2.6a Of The Ternary | gi\|31615460 |
| Complex Between Antithrombin, A P14-P8 Reactive | |
| Loop Peptide, And An Exogenous Tetrapeptide | |
| Chain L, Crystal Structure Of Antithrombin In The | gi\|37926954 |
| Pentasaccharide-Bound Intermediate | |
| State | |
| Chain L, Crystal Structure Of Antithrombin Variant | gi\|82408098 |
| S137aV317CT401C With Plasma Latent Antithrombin | |
| Chain L, Crystal Structure Of P13 Alanine Variant Of | gi\|48425164 |
| Antithrombin | |
| Chain L, Crystal Structure Of P14 Alanine Variant Of | gi\|150261272 |
| Antithrombin | |
| Chain L, Implications For Function And Therapy Of A | gi\|6729897 |
| 2.9a Structure Of Binary-Complexed Antithrombin | |
| Chain L, Intermediate Structure Of Antithrombin | gi\|209870631 |
| Bound | |
| To The Natural Pentasaccharide | |
| Chain L, N135q-S380c-Antithrombin-Iii | gi\|8569384 |
| Chain L, P14-Fluorescein-N135q-5380c-Antithrombin-Iii | gi\|8569386 |
| Chain L, Plasma Alpha Antithrombin-Iii | gi\|8569311 |
| Chain L, Plasma Alpha Antithrombin-Iii | gi\|8569307 |
| And | |
| Pentasaccharide | |
| Chain L, Plasma Beta Antithrombin-Iii | gi\|8569309 |
| Chain L, Structure Of Dimeric Antithrombin | gi\|31615499 |
| Complexed | |
| With A P14-P9 Reactive Loop Peptide And An | |
| Exogenous Tripeptide | |
| Chain L, Structure Of Dimeric Antithrombin | gi\|55669595 |
| Complexed | |
| With A P14-P9 Reactive Loop Peptide And An | |
| Exogenous Tripeptide (Formyl-Norleucine-Lf) | |
| Chain L, The 2.6 A Structure Of Antithrombin Indicates | gi\|2392667 |
| A Conformational Change At The Heparin Binding Site | |
| unnamed protein product [Homo sapiens] | gi\|311078924 |
| unnamed protein product [Homo sapiens] | gi\|311079000 |

[0288] Peptide Information

| | | | | Start | | |
|---|---|---|---|---|---|---|
| Calc. Mass | Obsrv. Mass | ±da | ±ppm | Seq. | End Seq. | Sequence |
| 850.4053 | 850.405 | −.0003 | 0 | 229 | 235 | FSPENTR |
| 850.4053 | 850.405 | −.0003 | 0 | 229 | 235 | FSPENTR |
| 978.5003 | 978.5024 | .0021 | 2 | 229 | 236 | FSPENTRK |
| 1175.6532 | 1175.6603 | .0071 | 6 | 394 | 403 | SLNPNRVTFK |
| 1211.642 | 1211.6508 | .0088 | 7 | 323 | 332 | FRIEDGFSLK |
| 1232.7263 | 1232.7316 | .0053 | 4 | 404 | 413 | ANRPFLVFIR |
| 1340.6635 | 1340.6824 | .0189 | 14 | 115 | 125 | TSDQIHFFFAK |
| 1340.6635 | 1340.6824 | .0189 | 14 | 115 | 125 | TSDQIHFFFAK |
| 1389.7559 | 1389.7552 | −.0007 | −1 | 414 | 425 | EVPLNTIIFMGR |
| 1405.7509 | 1405.7631 | .0122 | 9 | 414 | 425 | EVPLNTIIFMGR |
| 1405.7509 | 1405.7631 | .0122 | 9 | 414 | 425 | EVPLNTIIFMGR |
| 1437.7268 | 1437.7357 | .0089 | 6 | 1 | 13 | HGSPVDICTAKPR |
| 1441.6273 | 1441.6454 | .0181 | 13 | 14 | 24 | DIPMNPMCIYR |
| 1441.6273 | 1441.6454 | .0181 | 13 | 14 | 24 | DIPMNPMCIYR |
| 1674.8446 | 1674.8551 | .0105 | 6 | 170 | 183 | LQPLDFKENAEQ |
| | | | | | | SR |
| 1674.8446 | 1674.8551 | .0105 | 6 | 170 | 183 | LQPLDFKENAEQ |
| | | | | | | SR |
| 2202.1189 | 2202.1331 | .0142 | 6 | 351 | 370 | LPGIVAEGRDDL |
| | | | | | | YVSDAF |
| | | | | | | HK |
| 2291.1514 | 2291.175 | .0236 | 10 | 371 | 393 | AFLEVNEEGSEA |
| | | | | | | AASTAV VIAGR |

| | |
|---|---|
| RecName: Full = Antithrombin-III; Short = ATIII; | gi\|113936 |
| AltName: Full = Serpin C1; Flags: Precursor | |

[0289] Protein Group

| | |
|---|---|
| PRO0309 [Homo sapiens] | gi\|11493504 |
| antithrombin III [Homo sapiens] | gi\|179130 |
| antithrombin-III precursor [Homo sapiens] | gi\|4502261 |
| serine-cysteine proteinase inhibitor clade C member 1 | gi\|14326586 |
| [Homo sapiens] | |
| serpin peptidase inhibitor, clade C (antithrombin), | gi\|56204641 |
| member 1 [Homo sapiens] | |
| serpin peptidase inhibitor, clade C (antithrombin), | gi\|119611376 |
| member 1, isoform | |
| CRA_a [Homo | |
| sapiens] | |
| serpin peptidase inhibitor, clade C (antithrombin), | gi\|119611375 |
| member 1, isoform CRA_a [Homo | |
| sapiens] | |
| unnamed protein product [Homo sapiens] | gi\|311079002 |
| unnamed protein product [Homo sapiens] | gi\|311078958 |
| unnamed protein product [Homo sapiens] | gi\|189069199 |
| unnamed protein product [Homo sapiens] | gi\|311078948 |

[0290] Peptide Information

| | Obsrv. | | | Start | | |
|---|---|---|---|---|---|---|
| Calc. Mass | Mass | ±da | ±ppm | Seq. | End Seq. | Sequence |
| 850.4053 | 850.405 | −.0003 | 0 | 261 | 267 | FSPENTR |
| 850.4053 | 850.405 | −.0003 | 0 | 261 | 267 | FSPENTR |
| 978.5003 | 978.5024 | .0021 | 2 | 261 | 268 | FSPENTRK |
| 1175.6532 | 1175.6603 | .0071 | 6 | 426 | 435 | SLNPNRVTFK |
| 1211.642 | 1211.6508 | .0088 | 7 | 355 | 364 | FRIEDGFSLK |
| 1225.6423 | 1225.6396 | −.0027 | −2 | 2 | 13 | YSNVIGTVTSGK |
| 1232.7263 | 1232.7316 | .0053 | 4 | 436 | 445 | ANRPFLVFIR |
| 1340.6635 | 1340.6824 | .0189 | 14 | 147 | 157 | TSDQIHFFFAK |
| 1340.6635 | 1340.6824 | .0189 | 14 | 147 | 157 | TSDQIHFFFAK |
| 1389.7559 | 1389.7552 | −.0007 | −1 | 446 | 457 | EVPLNTIIFMGR |
| 1405.7509 | 1405.7631 | .0122 | 9 | 446 | 457 | EVPLNTIIFMGR |
| 1405.7509 | 1405.7631 | .0122 | 9 | 446 | 457 | EVPLNTIIFMGR |
| 1441.6273 | 1441.6454 | .0181 | 13 | 46 | 56 | DIPMNPMCIYR |
| 1441.6273 | 1441.6454 | .0181 | 13 | 46 | 56 | DIPMNPMCIYR |
| 1674.8446 | 1674.8551 | .0105 | 6 | 202 | 215 | LQPLDFKENAEQ |
| | | | | | | SR |
| 1674.8446 | 1674.8551 | .0105 | 6 | 202 | 215 | LQPLDFKENAEQ |
| | | | | | | SR |
| 2202.1189 | 2202.1331 | .0142 | 6 | 383 | 402 | LPGIVAEGRDDLY |
| | | | | | | VSDAF |
| | | | | | | HK |
| 2291.1514 | 2291.175 | .0236 | 10 | 403 | 425 | AFLEVNEEGSEA |
| | | | | | | AASTAV |
| | | | | | | VIAGR |

unnamed protein product [Homo sapiens]

[0291] Protein Group

| | |
|---|---|
| | gi\|311078998 |
| Chain A, Crystal Structure Of Native Antithrombin In | gi\|78100758 |
| Its | |
| Monomeric Form | |
| Chain B, Crystal Structure Of Native Antithrombin In | gi\|78100759 |
| Its | |
| Monomeric Form | |
| Chain C, Crystal Structure Of Native Antithrombin In | gi\|78100760 |
| Its | |
| Monomeric Form | |
| Chain C, Crystal Structure Of The Antithrombin-S195a | gi\|109157829 |
| Factor Xa-Pentasaccharide Complex | |
| Chain I, 2.1 Angstrom Structure Of A Nonproductive | gi\|116666783 |
| Complex Between Antithrombin, Synthetic Heparin | |
| Mimetic Sr123781 And Two S195a Thrombin | |
| Molecules | |
| Chain I, 2.5a Crystal Structure Of The | gi\|52695711 |
| Antithrombin-Thrombin-Heparin Ternary Complex | |
| Chain I, Crystal Structure Of Antithrombin Variant | gi\|82408097 |
| S137aV317CT401C With Plasma Latent Antithrombin | |
| Chain I, Crystal Structure Of | gi\|118137309 |
| Antithrombin-Iii | |
| Chain I, Crystal Structure Of P13 Alanine Variant Of | gi\|48425163 |
| Antithrombin | |
| Chain I, Crystal Structure Of P14 Alanine Variant Of | gi\|150261271 |
| Antithrombin | |
| Chain I, Crystal Structure Of The Antithrombin-S195a | gi\|109157826 |
| Factor Xa-Pentasaccharide Complex | |
| Chain I, N135q-S380c-Antithrombin-Iii | gi\|8569385 |
| Chain I, P14-Fluorescein-N135q-S380c-Antithrombin-Iii | gi\|8569387 |
| Chain L, Crystal Structure Of Antithrombin-Iii | gi\|118137310 |
| antithrombin | gi\|225767 |
| III | |
| antithrombin III [Homo sapiens] | gi\|179161 |
| antithrombin III [Homo sapiens] | |
| antithrombin III variant [Homo sapiens] | gi\|576554 |
| antithrombin III: ISOTYPE = toyama | gi\|228848 |
| antithrombin [Homo sapiens] | gi\|28907 |
| unnamed protein product [Homo sapiens] | gi\|311078996 |
| unnamed protein product [Homo sapiens] | gi\|311078994 |
| unnamed protein product [Homo sapiens] | gi\|311078992 |
| unnamed protein product [Homo sapiens] | gi\|311078990 |
| unnamed protein product [Homo sapiens] | gi\|311078988 |
| unnamed protein product [Homo sapiens] | gi\|311078986 |
| unnamed protein product [Homo sapiens] | gi\|311078984 |
| unnamed protein product [Homo sapiens] | gi\|311078970 |
| unnamed protein product [Homo sapiens] | gi\|311078968 |
| unnamed protein product [Homo sapiens] | gi\|57999350 |
| unnamed protein product [Homo sapiens] | gi\|311078966 |
| unnamed protein product [Homo sapiens] | gi\|311078964 |
| unnamed protein product [Homo sapiens] | gi\|311078962 |
| unnamed protein product [Homo sapiens] | gi\|311078960 |
| unnamed protein product [Homo sapiens] | gi\|311078956 |
| unnamed protein product [Homo sapiens] | gi\|311078954 |
| unnamed protein product [Homo sapiens] | gi\|311078952 |
| unnamed protein product [Homo sapiens] | gi\|311078950 |
| unnamed protein product [Homo sapiens] | gi\|311078946 |
| unnamed protein product [Homo sapiens] | gi\|311078944 |
| unnamed protein product [Homo sapiens] | gi\|311078942 |
| unnamed protein product [Homo sapiens] | gi\|311078940 |
| unnamed protein product [Homo sapiens] | gi\|311078938 |
| unnamed protein product [Homo sapiens] | gi\|311078936 |
| unnamed protein product [Homo sapiens] | gi\|311078932 |
| unnamed protein product [Homo sapiens] | gi\|311078930 |
| unnamed protein product [Homo sapiens] | gi\|311078928 |
| unnamed protein product [Homo sapiens] | gi\|311078926 |

[0292] Peptide Information

| | Obsrv. | | | Start | | |
|---|---|---|---|---|---|---|
| Calc. Mass | Mass | ±da | ±ppm | Seq. | End Seq. | Sequence |
| 1340.6635 | 1340.6824 | .0189 | 14 | 147 | 157 | TSDQIHFFFAK |
| 1405.7509 | 1405.7631 | .0122 | 9 | 446 | 457 | EVPLNTIIFMGR |
| 1674.8446 | 1674.8551 | .0105 | 6 | 202 | 215 | LQPLDFKENAEQ |
| | | | | | | SR |

Chain C, Solution Structure Of Human
Siga2

[0293] Protein Group

| | |
|---|---|
| | gi\|219109296 |
| Chain A, Crystal Structure Of A Staphylococcus | gi\|158430162 |
| Aureus | |
| Protein (Ssl7) In Complex With Fc Of Human Iga1 | |
| Chain A, Crystal Structure Of Human Fcari Bound To | gi\|31615935 |
| Iga1-Fc | |
| Chain A, Model Of Human Iga1 Determined By | gi\|40890038 |
| Solution | |
| Scattering Curve-Fitting And Homology Modelling | |
| Chain A, Solution Structure Of Human Dimeric | gi\|166007134 |
| Immunoglobulin A | |
| Chain A, Solution Structure Of Human Secretory Iga1 | gi\|219109282 |
| Chain A, Solution Structure Of Human | gi\|219109294 |
| Siga2 | |
| Chain A, Solution Structure Of The Complex Between | gi\|88192781 |
| Immunoglobulin Iga1 And Human Serum Albumin | |
| Chain B, Crystal Structure Of A Staphylococcus | gi\|158430163 |
| Aureus | |
| Protein (Ssl7) In Complex With Fc Of Human Iga1 | |
| Chain B, Crystal Structure Of Human Fcari Bound To | gi\|31615936 |
| Iga1-Fc | |
| Chain B, Model Of Human Iga1 Determined By | gi\|40890039 |
| Solution | |
| Scattering Curve-Fitting And Homology Modelling | |
| Chain B, Model Of Human Iga2 Determined By | gi\|56553653 |
| Solution | |
| Scattering, Curve Fitting And Homology Modelling | |
| Chain B, Solution Structure Of Human Dimeric | gi\|166007135 |
| Immunoglobulin A | |
| Chain B, Solution Structure Of Human Secretory Iga1 | gi\|219109283 |
| Chain B, Solution Structure Of Human | gi\|219109295 |
| Siga2 | |
| Chain B, Solution Structure Of The Complex Between | gi\|88192782 |
| Immunoglobulin Iga1 And Human Serum Albumin | |
| Chain C, Solution Structure Of Human Dimeric | gi\|166007138 |
| Immunoglobulin A | |
| Chain C, Solution Structure Of Human Secretory Iga1 | gi\|219109285 |
| Chain D, Model Of Human Iga2 Determined By | gi\|56553655 |
| Solution | |
| Scattering, Curve Fitting And Homology Modelling | |
| Chain D, Solution Structure Of Human Dimeric | gi\|166007139 |
| Immunoglobulin A | |
| Chain D, Solution Structure Of Human Secretory Iga1 | gi\|219109284 |
| Chain D, Solution Structure Of Human | gi\|219109297 |
| Siga2 | |
| IGH@ protein [Homo sapiens] | gi\|41351320 |
| Ig A1 Bur | gi\|229585 |
| Ig alpha-2 chain-human (fragment) | gi\|2135473 |
| Immunoglobulin heavy chain variant [Homo sapiens] | gi\|9367869 |
| RecName: Full = Ig alpha-1 chain C | gi\|113584 |
| region | |
| RecName: Full = Ig alpha-2 chain C | gi\|218512088 |
| region | |
| SNC66 protein [Homo sapiens] | gi\|17224464 |
| SNC73 protein [Homo sapiens] | gi\|3201900 |
| hCG1988537 [Homo sapiens] | gi\|119570893 |
| hypothetical protein [Homo sapiens] | gi\|34365139 |
| hypothetical protein [Homo sapiens] | gi\|34365085 |
| hypothetical protein [Homo sapiens] | gi\|34364649 |
| hypothetical protein [Homo sapiens] | gi\|34364645 |
| hypothetical protein [Homo sapiens] | gi\|31874190 |
| hypothetical protein [Homo sapiens] | gi\|31874206 |
| hypothetical protein [Homo sapiens] | gi\|34365128 |
| immunoglobulin A heavy chain allotype 2 [Homo | gi\|546799 |
| sapiens] | |
| immunoglobulin alpha 1 heavy chain constant region | gi\|50301689 |
| [Homo sapiens] | |
| immunoglobulin alpha 2m(1) heavy chain constant | gi\|50301691 |
| region [Homo sapiens] | |
| immunoglobulin alpha-1 heavy chain constant region | gi\|184749 |
| [Homo sapiens] | |
| immunoglobulin alpha-2 heavy chain [Homo sapiens] | gi\|184761 |
| immunoglobulin heavy chain constant alpha 1 | gi\|169249224 |
| membrane bound isoform 1 [Homo | |
| sapiens] | |
| immunoglobulin heavy chain constant alpha 1 | gi\|169249225 |
| membrane bound isoform 2 [Homo | |
| sapiens] | |
| immunoglobulin heavy chain constant region alpha 1 | gi\|12054070 |
| [Homo sapiens] | |
| unnamed protein product [Homo sapiens] | gi\|34536154 |
| unnamed protein product [Homo sapiens] | gi\|34536000 |
| unnamed protein product [Homo sapiens] | gi\|34535864 |
| unnamed protein product [Homo sapiens] | gi\|34527275 |
| unnamed protein product [Homo sapiens] | gi\|34527280 |
| unnamed protein product [Homo sapiens] | gi\|34527290 |
| unnamed protein product [Homo sapiens] | gi\|34527318 |
| unnamed protein product [Homo sapiens] | gi\|34527351 |
| unnamed protein product [Homo sapiens] | gi\|34527679 |
| unnamed protein product [Homo sapiens] | gi\|34535045 |
| unnamed protein product [Homo sapiens] | gi\|34533060 |
| unnamed protein product [Homo sapiens] | gi\|34532816 |
| unnamed protein product [Homo sapiens] | gi\|40038514 |
| unnamed protein product [Homo sapiens] | gi\|45502401 |
| unnamed protein product [Homo sapiens] | gi\|16554028 |
| unnamed protein product [Homo sapiens] | gi\|34526163 |
| unnamed protein product [Homo sapiens] | gi\|34526199 |
| unnamed protein | |
| product [Homo sapiens] | |
| unnamed protein product [Homo sapiens] | gi\|34527233 |
| unnamed protein product [Homo sapiens] | gi\|34527259 |
| unnamed protein product [Homo sapiens] | gi\|34532724 |
| unnamed protein product [Homo sapiens] | gi\|34531264 |
| unnamed protein product [Homo sapiens] | gi\|34531055 |
| unnamed protein product [Homo sapiens] | gi\|34529647 |
| unnamed protein product [Homo sapiens] | gi\|34529119 |
| unnamed protein product [Homo sapiens] | gi\|22760231 |
| unnamed protein product [Homo sapiens] | gi\|14042015 |

[0294] Peptide Information

| | | | | Start | | |
|---|---|---|---|---|---|---|
| Calc. Mass | Obsrv. Mass | ±da | ±ppm | Seq. | End Seq. | Sequence |
| 1835.9498 | 1835.9573 | .0075 | 4 | 392 | 408 | QEPSQGTTTFAV |
| | | | | | | TSILR |

| | |
|---|---|
| Ig Aalpha1 Bur | gi\|223099 |

[0295] Peptide Information

| Calc. | Obsrv. | | | Start | End | |
|---|---|---|---|---|---|---|
| Mass | Mass | ±da | ±ppm | Seq. | Seq. | Sequence |
| 1835.9498 | 1835.9573 | .0075 | 4 | 402 | 418 | QEPSZGTTTFA |
| | | | | | | VTSILR |

immunoglobulin heavy chain [Homo sapiens]
gi|46253743

[0296] Peptide Information

| | Obsrv. | | | Start | End | |
|---|---|---|---|---|---|---|
| Calc. Mass | Mass | ±da | ±ppm | Seq. | Seq. | Sequence |
| 928.437 | 928.4557 | .0187 | 20 | 49 | 56 | YSSSLESR |

| | |
|---|---|
| RecName: Full = Brefeldin | gi\|147742985 |
| A-inhibited guanine | |
| nucleotide-exchange protein 3 | |

[0297] Protein Group

| | |
|---|---|
| BIG3 [Homo sapiens] | gi\|15625588 |
| KIAA1244 [Homo sapiens] | gi\|223460210 |
| KIAA1244 [Homo sapiens] | gi\|168983997 |
| KIAA1244 [Homo sapiens] | gi\|119568303 |
| KIAA1244 [Homo sapiens] | gi\|168983855 |
| KIAA1244 [Homo sapiens] | gi\|168984026 |
| KIAA1244 protein [Homo sapiens] | gi\|40225579 |
| KIAA1244 protein [Homo sapiens] | gi\|20521814 |
| KIAA1244 protein [Homo sapiens] | gi\|21619911 |
| brefeldin A-inhibited guanine nucleotide-exchange | gi\|154350241 |
| protein 3 [Homo sapiens] | |
| hypothetical protein [Homo sapiens] | gi\|251733302 |
| unnamed protein product [Homo sapiens] | gi\|108250404 |

[0298] Peptide Information

| | Obsrv. | | | Start | End | |
|---|---|---|---|---|---|---|
| Calc. Mass | Mass | ±da | ±ppm | Seq. | Seq. | Sequence |
| 928.4444 | 928.4557 | .0113 | 12 | 2013 | 2020 | IYTMAADK |

| | |
|---|---|
| PHD finger protein 6 [Homo sapiens] | gi\|57209488 |

[0299] Protein Group

| | |
|---|---|
| KIAA1823 protein [Homo sapiens] | gi\|14017863 |
| PHD finger protein 6 [Homo sapiens] | gi\|57209486 |
| PHD finger protein 6 isoform 1 [Homo sapiens] | gi\|62865858 |
| PHD finger protein 6 isoform 1 [Homo sapiens] | gi\|28557677 |
| PHD finger protein 6, isoform CRA_b [Homo sapiens] | gi\|119632171 |
| PHD finger protein 6, isoform CRA_b [Homo sapiens] | gi\|119632168 |
| PHD finger protein 6, isoform CRA_d [Homo sapiens] | gi\|119632170 |
| PHD-like zinc finger protein [Homo sapiens] | gi\|27497549 |
| RecName: Full = PHD finger protein 6; AltName: | gi\|42559482 |
| Full = PHD-like zinc finger protein | |
| unnamed protein product [Homo sapiens] | |
| unnamed protein product [Homo sapiens] | |

[0300] Peptide Information

| | Obsrv. | | | Start | End | |
|---|---|---|---|---|---|---|
| Calc. Mass | Mass | ±da | ±ppm | Seq. | Seq. | Sequence |
| 928.4193 | 928.4557 | .0364 | 39 | 314 | 320 | YIENMSR |

| | |
|---|---|
| zinc finger, CCHC domain containing | gi\|119582703 |
| 10, isoform CRA_d [Homo sapiens] | |

[0301] Protein Group

| | |
|---|---|
| RecName: Full = Zinc finger CCHC domain-containing | gi\|84028163 |
| protein 10 | |
| ZCCHC10 protein [Homo sapiens] | gi\|18490660 |
| Zinc finger, CCHC domain containing 10 [Homo | gi\|13528822 |
| sapiens] | |
| unnamed protein product [Homo sapiens] | gi\|194373877 |
| unnamed protein product [Homo sapiens] | gi\|193784674 |
| unnamed protein product [Homo sapiens] | gi\|7019971 |
| unnamed protein product [Homo sapiens] | gi\|40043232 |
| unnamed protein product [Homo sapiens] | gi\|40977976 |
| zinc finger CCHC domain-containing protein 10 [Homo | gi\|8923106 |
| sapiens] | |
| zinc finger, CCHC domain containing 10, isoform | gi\|119582700 |
| CRA_a [Homo sapiens] | |
| zinc finger, CCHC domain containing 10, isoform | gi\|119582701 |
| CRA_b [Homo sapiens] | |
| zinc finger, CCHC domain containing 10, isoform | gi\|119582702 |
| CRA_c [Homo sapiens] | |
| zinc finger, CCHC domain containing 10, isoform | gi\|119582704 |
| CRA_e [Homo sapiens] | |

[0302] Peptide Information

| | Obsrv. | | | Start | End | |
|---|---|---|---|---|---|---|
| Calc. Mass | Mass | ±da | ±ppm | Seq. | Seq. | Sequence |
| 928.5111 | 928.4557 | −.0554 | −60 | 64 | 70 | YLHRPSR |

| | |
|---|---|
| class E basic helix-loop-helix protein | gi\|13540521 |
| 41 [Homo sapiens] | |

[0303] Protein Group

| | |
|---|---|
| Basic helix-loop-helix family, member e41 [Homo | gi\|19684064 |
| sapiens] | |
| RecName: Full = Class E basic helix-loop-helix protein | gi\|20137459 |
| 41; Short = bHLHe41; AltName: | |
| Full = Class B basic helix-loop-helix | |
| protein 3; Short = bHLHb3; AltName: | |
| Full = Differentially expressed in | |
| chondrocytes protein | |
| 2; | |
| Short = hDEC2; AltName: Full = Enhancer-of-split and | |
| hairy-related protein 1; Short = SHARP-1 | |
| bHLH protein DEC2 [Homo sapiens] | gi\|12583669 |
| basic helix-loop-helix domain containing, class B, 3, | gi\|119616934 |
| isoform CRA_a [Homo sapiens] | |
| basic helix-loop-helix domain containing, class B, 3, | gi\|119616933 |
| isoform CRA_a [Homo sapiens] | |
| basic helix-loop-helix domain-containing [Homo | gi\|121647001 |
| sapiens] | |
| basic helix-loop-helix protein 3 isoform 1 [Homo | gi\|55669468 |
| sapiens] | |
| unnamed protein product [Homo sapiens] | gi\|221044670 |

[0304] Peptide Information

| Calc. | Obsrv. | | | Start | End | |
|---|---|---|---|---|---|---|
| Mass | Mass | ±da | ±ppm | Seq. | Seq. | Sequence |
| 1340.6263 | 1340.6824 | .0561 | 42 | 1 | 11 | MDEGIPH |
| | | | | | | LQER |

| | |
|---|---|
| RecName: Full = Alkaline phosphatase, | gi\|68067533 |
| tissue-nonspecific isozyme; Short = | |
| AP-TNAP; Short = TNSALP; AltName: | |
| Full = Alkaline phosphatase | |
| liver/bone/kidney | |
| isozyme; Flags: | |
| Precursor | |

[0305] Protein Group

| | |
|---|---|
| Alkaline phosphatase, liver/bone/kidney [Homo sapiens] | gi\|187954299 |
| Alkaline phosphatase, liver/bone/kidney [Homo sapiens] | gi\|127801853 |
| Alkaline phosphatase, liver/bone/kidney [Homo sapiens] | gi\|127799935 |
| Alkaline phosphatase, liver/bone/kidney [Homo sapiens] | gi\|127799243 |
| Alkaline phosphatase, liver/bone/kidney [Homo sapiens] | gi\|118835602 |
| Alkaline phosphatase, liver/bone/kidney [Homo sapiens] | gi\|127796485 |
| alkalin phosphatase [Homo sapiens] | gi\|3401945 |
| alkaline phosphatase [Homo sapiens] | gi\|178462 |
| alkaline phosphatase, liver/bone/kidney [Homo sapiens] | gi\|55959694 |
| alkaline phosphatase, liver/bone/kidney [Homo sapiens] | gi\|55665927 |
| alkaline phosphatase, liver/bone/kidney, isoform | gi\|119615382 |
| CRA_a | |
| [Homo sapiens] | |
| alkaline phosphatase, liver/bone/kidney, isoform | gi\|119615381 |
| CRA_a | |
| [Homo sapiens] | |
| alkaline phosphatase, liver/bone/kidney, isoform | gi\|119615380 |
| CRA_a | |
| [Homo sapiens] | |
| alkaline phosphatase, liver/bone/kidney, isoform | gi\|119615383 |
| CRA_b | |
| [Homo sapiens] | |
| alkaline phosphatase, tissue-nonspecific isozyme | gi\|116734717 |
| isoform 1 precursor [Homo sapiens] | |
| alkaline phosphatase, tissue-nonspecific isozyme | gi\|294660770 |
| isoform 2 [Homo sapiens] | |
| alkaline phosphatase, tissue-nonspecific isozyme | gi\|294660772 |
| isoform 3 [Homo sapiens] | |
| unnamed protein product [Homo sapiens] | gi\|221040844 |
| unnamed protein product [Homo sapiens] | gi\|28738 |
| unnamed protein product [Homo sapiens] | gi\|221042090 |
| unnamed protein product [Homo sapiens] | gi\|189069211 |
| unnamed protein product [Homo sapiens] | gi\|221039408 |

[0306] Peptide Information

| | | | | Start | End | |
|---|---|---|---|---|---|---|
| Calc. Mass | Obsrv. Mass | ±da | ±ppm | Seq. | Seq. | Sequence |
| 1835.9028 | 1835.9573 | .0545 | 30 | 137 | 152 | SRCNTTQGNEVT |
| | | | | | | SILR |

| | |
|---|---|
| eukaryotic translation initiation factor 3 | gi\|312433975 |
| subunit C [Homo sapiens] | |

[0307] Protein Group

| | |
|---|---|
| EIF3CL protein [Homo sapiens] | gi\|187956832 |
| Eukaryotic translation initiation factor 3, subunit C | gi\|187957270 |
| [Homo sapiens] | |
| Eukaryotic translation initiation factor 3, subunit C | gi\|16306765 |
| [Homo sapiens] | |
| Eukaryotic translation initiation factor 3, subunit C | gi\|47939099 |
| [Homo sapiens] | |
| RecName: Full = Eukaryotic translation initiation | gi\|6685539 |
| factor 3 subunit C; Short = eIF3c; AltName: | |
| Full = Eukaryotic translation initiation factor 3 | |
| subunit 8; AltName: Full = eIF3 p110 | |
| Translation initiation factor eIF-p110 [Homo sapiens] | gi\|3337383 |
| cell migration-inducing protein 17 [Homo sapiens] | gi\|59803473 |
| eIF-3 p110 subunit [Homo sapiens] | gi\|1931584 |
| eukaryotic translation initiation factor 3 subunit C [Homo | gi\|153791492 |
| sapiens] | |
| eukaryotic translation initiation factor 3 subunit C [Homo | gi\|83700233 |
| sapiens] | |
| eukaryotic translation initiation factor 3 subunit C [Homo | gi\|4503525 |
| sapiens] | |
| eukaryotic translation initiation factor 3, subunit 8, | gi\|119570881 |
| 110 kDa, isoform CRA_a [Homo sapiens] | |
| eukaryotic translation initiation factor 3, subunit 8, | gi\|119570877 |
| 110 kDa, isoform CRA_a [Homo sapiens] | |
| eukaryotic translation initiation factor 3, subunit 8, | gi\|119570879 |
| 110 kDa, isoform CRA_a [Homo sapiens] | |
| eukaryotic translation initiation factor 3, subunit 8, | gi\|119570880 |
| 110 kDa, isoform CRA_b [Homo sapiens] | |
| eukaryotic translation initiation factor 3, subunit 8, | gi\|119570878 |
| 110 kDa, isoform CRA_b [Homo sapiens] | |
| translation intiation factor eIF-3 p110 subunit [Homo | gi\|1718197 |
| sapiens] | |
| unnamed protein product [Homo sapiens] | gi\|194385866 |
| unnamed protein product [Homo sapiens] | gi\|194383552 |
| unnamed protein product [Homo sapiens] | gi\|194376092 |
| unnamed protein product [Homo sapiens] | gi\|194375309 |
| unnamed protein product [Homo sapiens] | gi\|194373399 |
| unnamed protein product [Homo sapiens] | gi\|7021015 |
| unnamed protein product [Homo sapiens] | gi\|158257742 |
| unnamed protein product [Homo sapiens] | gi\|194387978 |
| unnamed protein product [Homo | gi\|193786223 |
| sapiens] | |

[0308] Peptide Information

| Calc. | | | | Start | End | |
|---|---|---|---|---|---|---|
| Mass | Obsrv. Mass | ±da | ±ppm | Seq. | Seq. | Sequence |
| 928.4886 | 928.4557 | −.0329 | −35 | 554 | 560 | YIYAKDR |

| | |
|---|---|
| BarH-like homeobox 1 [Homo sapiens] | gi\|219521562 |

[0309] Peptide Information

| | Obsrv. | | | Start | End | |
|---|---|---|---|---|---|---|
| Calc. Mass | Mass | ±da | ±ppm | Seq. | Seq. | Sequence |
| 928.4886 | 928.4557 | −.0329 | −35 | 202 | 208 | YLSVQYR |

| | |
|---|---|
| eukaryotic translation initiation | gi\|119598673 |
| factor 4 gamma, 1, isoform | |
| CRA_g [Homo sapiens] | |

[0310] Protein Group

| | |
|---|---|
| EIF4G1 protein [Homo sapiens] | gi\|187956781 |
| EIF4G1 protein [Homo sapiens] | gi\|187954575 |
| EIF4G1 protein [Homo sapiens] | gi\|14043628 |
| EIF4G1 variant protein [Homo sapiens] | gi\|68533081 |
| RecName: Full = Eukaryotic translation initiation | gi\|294862538 |
| factor 4 gamma 1; Short = eIF-4-gamma 1; | |
| Short = eIF-4G 1; Short = eIF-4G1; | |
| AltName: Full = p220 | |
| eukaryotic protein synthesis initiation factor [Homo | gi\|3941724 |
| sapiens] | |
| eukaryotic translation initiation factor 4 gamma 1 | gi\|302699237 |
| isoform 1 [Homo sapiens] | |
| eukaryotic translation initiation factor 4 gamma 1 | gi\|38201627 |
| isoform 2 [Homo sapiens] | |
| eukaryotic translation initiation factor 4 gamma 1 | gi\|38201625 |
| isoform 3 [Homo sapiens] | |
| eukaryotic translation initiation factor 4 gamma 1 | gi\|302699239 |
| isoform 4 [Homo sapiens] | |
| eukaryotic translation initiation factor 4 gamma 1 | gi\|38201623 |
| isoform 5 [Homo sapiens] | |
| eukaryotic translation initiation factor 4 gamma 1 | gi\|302699247 |
| isoform 6 [Homo sapiens] | |
| eukaryotic translation initiation factor 4 gamma 1 | gi\|302699245 |
| isoform 6 [Homo sapiens] | |
| eukaryotic translation initiation factor 4 gamma, 1 | gi\|30583403 |
| [Homo sapiens] | |
| eukaryotic translation initiation factor 4 gamma, 1, | gi\|119598663 |
| isoform CRA_a [Homo sapiens] | |
| eukaryotic translation initiation factor 4 gamma, 1, | gi\|119598672 |
| isoform CRA_c [Homo sapiens] | |
| eukaryotic translation initiation factor 4 gamma, 1, | gi\|119598669 |
| isoform CRA_c [Homo sapiens] | |
| eukaryotic translation initiation factor 4 gamma, 1, | gi\|119598665 |
| isoform CRA_c [Homo sapiens] | |
| eukaryotic translation initiation factor 4 gamma, 1, | gi\|119598666 |
| isoform CRA_d [Homo sapiens] | |
| eukaryotic translation initiation factor 4 gamma, 1, | gi\|119598667 |
| isoform CRA_e [Homo sapiens] | |
| eukaryotic translation initiation factor 4 gamma, 1, | gi\|119598671 |
| isoform CRA_f [Homo sapiens] | |
| eukaryotic translation initiation factor 4 gamma, 1, | gi\|119598668 |
| isoform CRA_f [Homo sapiens] | |
| eukaryotic translation initiation factor 4 gamma, 1, | gi\|119598670 |
| isoform CRA_g [Homo sapiens] | |
| eukaryotic translation initiation factor 4 gamma, 1, | gi\|119598674 |
| isoform CRA_h [Homo sapiens] | |
| eukaryotic translation initiation factor 4G I [Homo | gi\|21634449 |
| sapiens] | |
| eukaryotic translation initiation factor 4GI [Homo | gi\|21655146 |
| sapiens] | |
| hypothetical protein [Homo sapiens] | gi\|57997536 |
| unnamed protein product [Homo sapiens] | gi\|194389380 |
| unnamed protein product [Homo sapiens] | |

[0311] Peptide Information

| Calc. | Obsrv. | | | Start | End | |
|---|---|---|---|---|---|---|
| Mass | Mass | ±da | ±ppm | Seq. | Seq. | Sequence |
| 1340.7355 | 1340.6824 | −.0531 | −40 | 929 | 939 | EHIKVQ |
| | | | | | | QLMAK |

| | |
|---|---|
| exocyst complex component 6, | gi\|119570470 |
| isoform CRA_d [Homo sapiens] | |

[0312] Protein Group

| | |
|---|---|
| Exocyst complex component 6 [Homo sapiens] | gi\|34783239 |
| RecName: Full = Exocyst complex component 6; | gi\|212287926 |
| AltName: Full = Exocyst complex component | |
| Sec15A; AltName: Full = SEC15-like protein 1 | |
| SEC15-like protein 3 [Homo sapiens] | gi\|148608033 |
| exocyst complex component 6 [Homo sapiens] | gi\|123231220 |
| exocyst complex component 6 [Homo sapiens] | gi\|55665929 |
| exocyst complex component 6 [Homo sapiens] | gi\|123227366 |
| exocyst complex component 6 isoform a [Homo | gi\|65507403 |
| sapiens] | |
| exocyst complex component 6 isoform b [Homo | gi\|62243652 |
| sapiens] | |
| exocyst complex component 6, isoform CRA_a [Homo | gi\|119570467 |
| sapiens] | |
| exocyst complex component 6, isoform CRA_b [Homo | gi\|119570468 |
| sapiens] | |
| exocyst complex component 6, isoform CRA_c [Homo | gi\|119570469 |
| sapiens] | |
| exocyst complex component 6, isoform CRA_e [Homo | gi\|119570471 |
| sapiens] | |
| hypothetical protein [Homo sapiens] | gi\|6807998 |
| unnamed protein product [Homo sapiens] | gi\|221043148 |
| unnamed protein product [Homo sapiens] | gi\|194375816 |
| unnamed protein product [Homo sapiens] | gi\|40032933 |
| unnamed protein product [Homo sapiens] | gi\|108250166 |
| unnamed protein product [Homo sapiens] | gi\|193785860 |
| unnamed protein product [Homo sapiens] | gi\|189054938 |
| unnamed protein product [Homo sapiens] | gi\|7023795 |
| unnamed protein product | |
| [Homo sapiens] | |

[0313] Peptide Information

| | Obsrv. | | | Start | End | |
|---|---|---|---|---|---|---|
| Calc. Mass | Mass | ±da | ±ppm | Seq. | Seq. | Sequence |
| 928.5138 | 928.4557 | −.0581 | −63 | 583 | 590 | LYGLSTFK |

| | |
|---|---|
| RecName: Full = Protein FAM183B | gi\|215275260 |

[0314] Protein Group

| | |
|---|---|
| hCG1645872 [Homo sapiens] | gi\|119614518 |
| hypothetical gene supported by BC045803 [Homo | gi\|51094744 |
| sapiens] | |
| testis highly expressed protein 6 [Homo sapiens] | gi\|225734648 |
| unnamed protein product [Homo sapiens] | gi\|261385756 |
| unnamed protein product [Homo sapiens] | gi\|40046854 |

[0315] Peptide Information

| | Obsrv. | | | Start | End | |
|---|---|---|---|---|---|---|
| Calc. Mass | Mass | ±da | ±ppm | Seq. | Seq. | Sequence |
| 1835.9723 | 1835.9573 | −.015 | −8 | 7 | 21 | ERVVTDEVHQNQILR |

| | |
|---|---|
| SWI/SNF related, matrix associated, | gi\|119579218 |
| actin dependent regulator of chromatin, | |
| subfamily a, member 2, isoform | |
| CRA_a [Homo sapiens] | |

[0316] Protein Group

| | |
|---|---|
| HBRM [Homo sapiens] | gi\|414117 |
| RecName: Full = Probable global transcription activator | gi\|212276472 |
| SNF2L2; AltName: Full = ATP-dependent helicase | |
| SMARCA2; AltName: Full = BRG1-associated factor | |
| 190B; Short = BAF190B; AltName: Full = Protein | |
| brahma homolog; Short = hBRM; AltName: | |
| Full = SNF2-alpha; AltName: Full = SWI/SNF- | |
| related matrix-associated actin-dependent | |
| regulator of chromatin subfamily A | |
| member 2 | |
| SWI/SNF related, matrix associated, actin dependent | gi\|55957478 |
| regulator of chromatin, subfamily a, member 2 [Homo | |
| sapiens] | |
| SWI/SNF related, matrix associated, actin dependent | gi\|55958984 |
| regulator of chromatin, subfamily a, member 2 [Homo | |
| sapiens] | |
| SWI/SNF related, matrix associated, actin dependent | gi\|55958983 |
| regulator of chromatin, subfamily a, member 2 [Homo | |
| sapiens] | |
| SWI/SNF related, matrix associated, actin dependent | gi\|55957477 |
| regulator of chromatin, subfamily a, member 2 [Homo | |
| sapiens] | |
| SWI/SNF related, matrix associated, actin dependent | gi\|55958982 |
| regulator of chromatin, subfamily a, | |
| member 2 [Homo sapiens] | |
| SWI/SNF related, matrix associated, actin | gi\|119579215 |
| dependent | |
| regulator of chromatin, subfamily a, | |
| member 2, isoform | |
| CRA_a [Homo sapiens] | |
| SWI/SNF related, matrix associated, actin | gi\|119579217 |
| dependent | |
| regulator of chromatin, subfamily a, | |
| member 2, isoform | |
| CRA_c [Homo sapiens] | |
| SWI/SNF related, matrix associated, actin | gi\|119579219 |
| dependent | |
| regulator of chromatin, subfamily a, | |
| member 2, isoform | |
| CRA_c [Homo sapiens] | |
| probable global transcription activator | gi\|48255900 |
| SNF2L2 isoform | |
| a [Homo sapiens] | |
| probable global transcription activator | gi\|48255898 |
| SNF2L2 isoform | |
| b [Homo sapiens] | |

[0317] Peptide Information

| Calc. | Obsrv. | | | Start | End | |
|---|---|---|---|---|---|---|
| Mass | Mass | ±da | ±ppm | Seq. | Seq. | Sequence |
| 1405.7039 | 1405.7631 | .0592 | 42 | 391 | 401 | QLRQEV |
| | | | | | | VACMR |

| | |
|---|---|
| C protein [Homo sapiens] | gi\|36501 |

[0318] Peptide Information

| | Obsrv. | | | Start | End | |
|---|---|---|---|---|---|---|
| Calc. Mass | Mass | ±da | ±ppm | Seq. | Seq. | Sequence |
| 949.4924 | 949.515 | .0226 | 24 | 972 | 978 | KSMEWLR |

| | |
|---|---|
| transducin-like enhancer | gi\|55959926 |
| of split 4 (E(sp1) homolog, | |
| Drosophila) [Homo sapiens] | |

[0319] Protein Group

| | |
|---|---|
| transducin-like enhancer of split 4 (E(sp1) | gi\|55958795 |
| homolog, | |
| Drosophila) [Homo sapiens] | |
| transducin-like enhancer of split 4 (E(sp1) | gi\|57208918 |
| homolog, | |
| Drosophila) [Homo sapiens] | |

[0320] Peptide Information

| | Obsrv. | | | Start | End | |
|---|---|---|---|---|---|---|
| Calc. Mass | Mass | ±da | ±ppm | Seq. | Seq. | Sequence |
| 850.4417 | 850.405 | −.0367 | −43 | 198 | 205 | VSPSASFR |

| | |
|---|---|
| leucine rich repeat containing 27, | gi\|119569507 |
| isoform CRA_b [Homo sapiens] | |

[0321] Protein Group

| | |
|---|---|
| KIAA1674 protein [Homo sapiens] | gi\|12697893 |
| RecName: Full = Leucine-rich repeat-containing protein | gi\|85701139 |
| 27 | |
| leucine rich repeat containing 27, isoform CRA_a | gi\|119569506 |
| [Homo sapiens] | |
| leucine rich repeat containing 27, isoform CRA_a | gi\|119569508 |
| [Homo sapiens] | |
| leucine-rich repeat-containing protein 27 isoform a | gi\|219555700 |
| [Homo sapiens] | |
| leucine-rich repeat-containing protein 27 isoform a | gi\|55741567 |
| [Homo sapiens] | |
| novel protein [Homo sapiens] | gi\|55960576 |
| novel protein [Homo sapiens] | gi\|55960574 |
| novel protein [Homo sapiens] | |
| unnamed protein product [Homo sapiens] | gi\|194376382 |
| unnamed protein product [Homo sapiens] | gi\|193783556 |
| unnamed protein product [Homo sapiens] | gi\|21752065 |

[0322] Peptide Information

| Calc. | Obsrv. | | | Start | End | |
|---|---|---|---|---|---|---|
| Mass | Mass | ±da | ±ppm | Seq. | Seq. | Sequence |
| 1340.6852 | 1340.6824 | −.0028 | −2 | 381 | 390 | QHVLQ |
| | | | | | | MREQR |

### 3—Prothrombin Complex Concentrate

[0323] Below is the sequence of the 8 new found proteins which will be named KH11, KH12, KH13, KH14, KH15, KH16, KH17 and KH18 and its functions are under investigation.

| | | | |
|---|---|---|---|
| | 60/C9 | | Instr./Gel |
| | | | Origin |
| | [1] Sample Project | | Instrument |
| | 20110503 | | Sample |
| | | | Name |
| Protein Name - | KH11 (SEQ ID NO. KH11) | Accession No. | |

| | |
|---|---|
| unnamed protein product [Homo sapiens] | gi\|215415638 |

[0324] Peptide Information

| Calc. | Obsrv. | | | Start | End | |
|---|---|---|---|---|---|---|
| Mass | Mass | ±da | ±ppm | Seq. | Seq. | Sequence |
| 831.4359 | 831.4695 | .0336 | 40 | 189 | 195 | LAEYHAK |
| 869.5203 | 869.5491 | .0288 | 33 | 117 | 123 | QKVEPLR |
| 873.4424 | 873.4709 | .0285 | 33 | 124 | 131 | AELQEGAR |
| 1008.5697 | 1008.5928 | .0231 | 23 | 152 | 160 | ARAHVDALR |
| 1012.5786 | 1012.6014 | .0228 | 23 | 207 | 215 | AKPALEDLR |
| 1012.5786 | 1012.6014 | .0228 | 23 | 207 | 215 | AKPALEDLR |
| 1226.5437 | 1226.5634 | .0197 | 16 | 1 | 10 | DEPPQSPWDR |
| 1226.5437 | 1226.5634 | .0197 | 16 | 1 | 10 | DEPPQSPWDR |
| 1252.6208 | 1252.6487 | .0279 | 22 | 97 | 106 | VQPYLDDFQK |
| 1283.5725 | 1283.6271 | .0546 | 43 | 108 | 116 | WQEEMELYR |
| 1301.6484 | 1301.66 | .0116 | 9 | 161 | 171 | THLAPYSDELR |
| 1301.6484 | 1301.66 | .0116 | 9 | 161 | 171 | THLAPYSDELR |
| 1311.5555 | 1311.5947 | .0392 | 30 | 78 | 88 | ETEGLCQEMSK |
| 1318.642 | 1318.6689 | .0269 | 20 | 141 | 151 | LSPLGEEMRDR |
| 1327.5505 | 1327.6265 | .076 | 57 | 78 | 88 | ETEGLCQEMSK |
| 1380.7158 | 1380.7303 | .0145 | 11 | 97 | 107 | VQPYLDDFQKK |
| 1386.7152 | 1386.7365 | .0213 | 15 | 227 | 238 | VSFLSALEEYTK |
| 1400.6693 | 1400.715 | .0457 | 33 | 28 | 40 | DYVSQFEGSALGK |
| 1411.6675 | 1411.6667 | −.0008 | −1 | 107 | 116 | KWQEEMELYR |
| 1453.707 | 1453.7174 | .0104 | 7 | 1 | 12 | DEPPQSPWDRVK |
| 1467.7914 | 1467.7849 | −.0065 | −4 | 119 | 131 | VEPLRAELQEGAR |
| 1467.7914 | 1467.7849 | −.0065 | −4 | 119 | 131 | VEPLRAELQEGAR |
| 1585.8081 | 1585.8174 | .0093 | 6 | 161 | 173 | THLAPYSDELRQR |
| 1585.8081 | 1585.8174 | .0093 | 6 | 161 | 173 | THLAPYSDELRQR |
| 1612.7854 | 1612.8048 | .0194 | 12 | 46 | 59 | LLDNWDSVTSTFSK |
| 1650.8698 | 1650.8733 | .0035 | 2 | 13 | 27 | DLATVYVDVLKDS |
| | | | | | | GR |
| 1815.8508 | 1815.8446 | −.0062 | −3 | 24 | 40 | DSGRDYVSQFEGS |
| | | | | | | ALGK |
| 1815.8508 | 1815.8446 | −.0062 | −3 | 24 | 40 | DSGRDYVSQFE |
| | | | | | | GSALGK |
| 2202.1189 | 2202.0879 | −.031 | −14 | 60 | 77 | LREQLGPVTQEFWDNLEK |

| | |
|---|---|
| Chain A, Solution Structure Of Double Super | gi\|293651900 |
| Helix Model | |

[0325] Protein Group

| | |
|---|---|
| Chain A, Crystal Structure Of Lipid-Free Human | gi\|90108664 |
| Apolipoprotein A-I | |
| Chain B, Crystal Structure Of Lipid-Free Human | gi\|90108665 |
| Apolipoprotein A-I | |
| Chain B, Solution Structure Of Double Super Helix | gi\|293651901 |
| Model | |
| Chain C, Crystal Structure Of Lipid-Free Human | gi\|90108666 |
| Apolipoprotein A-I | |
| apoA1 [Homo sapiens] | gi\|490098 |
| apoAI [Homo sapiens] | gi\|1330306 |
| unnamed protein product [Homo sapiens] | gi\|215415678 |

[0326] Peptide Information

| | | | | Start | End | |
|---|---|---|---|---|---|---|
| Calc. Mass | Obsrv. Mass | ±da | ±ppm | Seq. | Seq. | Sequence |
| 831.4359 | 831.4695 | .0336 | 40 | 189 | 195 | LAEYHAK |
| 869.5203 | 869.5491 | .0288 | 33 | 117 | 123 | QKVEPLR |
| 873.4424 | 873.4709 | .0285 | 33 | 124 | 131 | AELQEGAR |
| 1008.5697 | 1008.5928 | .0231 | 23 | 152 | 160 | ARAHVDALR |
| 1012.5786 | 1012.6014 | .0228 | 23 | 207 | 215 | AKPALEDLR |
| 1012.5786 | 1012.6014 | .0228 | 23 | 207 | 215 | AKPALEDLR |
| 1226.5437 | 1226.5634 | .0197 | 16 | 1 | 10 | DEPPQSPWDR |
| 1226.5437 | 1226.5634 | .0197 | 16 | 1 | 10 | DEPPQSPWDR |
| 1252.6208 | 1252.6487 | .0279 | 22 | 97 | 106 | VQPYLDDFQK |
| 1283.5725 | 1283.6271 | .0546 | 43 | 108 | 116 | WQEEMELYR |
| 1301.6484 | 1301.66 | .0116 | 9 | 161 | 171 | THLAPYSDELR |
| 1301.6484 | 1301.66 | .0116 | 9 | 161 | 171 | THLAPYSDELR |
| 1318.642 | 1318.6689 | .0269 | 20 | 141 | 151 | LSPLGEEMRDR |
| 1323.621 | 1323.6156 | −.0054 | −4 | 78 | 88 | ETEGLRQEMSK |
| 1380.7158 | 1380.7303 | .0145 | 11 | 97 | 107 | VQPYLDDFQ |
| | | | | | | KK |
| 1386.7152 | 1386.7365 | .0213 | 15 | 227 | 238 | VSFLSALEE |
| | | | | | | YTK |
| 1400.6693 | 1400.715 | .0457 | 33 | 28 | 40 | DYVSQFEGS |
| | | | | | | ALGK |
| 1411.6675 | 1411.6667 | −.0008 | −1 | 107 | 116 | KWQEEMEL |
| | | | | | | YR |
| 1453.707 | 1453.7174 | .0104 | 7 | 1 | 12 | DEPPQSPW |
| | | | | | | DRVK |
| 1467.7914 | 1467.7849 | −.0065 | −4 | 119 | 131 | VEPLRAELQEGAR |
| 1467.7914 | 1467.7849 | −.0065 | −4 | 119 | 131 | VEPLRAELQEGAR |
| 1585.8081 | 1585.8174 | .0093 | 6 | 161 | 173 | THLAPYSDELRQR |
| 1585.8081 | 1585.8174 | .0093 | 6 | 161 | 173 | THLAPYSDELRQR |
| 1612.7854 | 1612.8048 | .0194 | 12 | 46 | 59 | LLDNWDSVTSTF |
| | | | | | | SK |
| 1650.8698 | 1650.8733 | .0035 | 2 | 13 | 27 | DLATVYVDVLKD |
| | | | | | | SGR |
| 1815.8508 | 1815.8446 | −.0062 | −3 | 24 | 40 | DSGRDYVSQFE |
| | | | | | | GSALGK |
| 1815.8508 | 1815.8446 | −.0062 | −3 | 24 | 40 | DSGRDYVSQFE |
| | | | | | | GSALGK |
| 2202.1189 | 2202.0879 | −.031 | −14 | 60 | 77 | LREQLGPVTQEF |
| | | | | | | WDNLEK |

| | |
|---|---|
| unnamed protein product [Homo sapiens] | gi\|215415636 |

[0327] Peptide Information

| | | | | Start | End | |
|---|---|---|---|---|---|---|
| Calc. Mass | Obsrv. Mass | ±da | ±ppm | Seq. | Seq. | Sequence |
| 831.4359 | 831.4695 | .0336 | 40 | 189 | 195 | LAEYHAK |
| 869.5203 | 869.5491 | .0288 | 33 | 117 | 123 | QKVEPLR |
| 873.4424 | 873.4709 | .0285 | 33 | 124 | 131 | AELQEGAR |
| 1008.5697 | 1008.5928 | .0231 | 23 | 152 | 160 | ARAHVDALR |
| 1012.5786 | 1012.6014 | .0228 | 23 | 207 | 215 | AKPALEDLR |
| 1012.5786 | 1012.6014 | .0228 | 23 | 207 | 215 | AKPALEDLR |
| 1226.5437 | 1226.5634 | .0197 | 16 | 1 | 10 | DEPPQSPWDR |
| 1226.5437 | 1226.5634 | .0197 | 16 | 1 | 10 | DEPPQSPWDR |
| 1252.6208 | 1252.6487 | .0279 | 22 | 97 | 106 | VQPYLDDFQK |
| 1283.5725 | 1283.6271 | .0546 | 43 | 108 | 116 | WQEEMELYR |
| 1301.6484 | 1301.66 | .0116 | 9 | 161 | 171 | THLAPYSDELR |
| 1301.6484 | 1301.66 | .0116 | 9 | 161 | 171 | THLAPYSDELR |
| 1318.642 | 1318.6689 | .0269 | 20 | 141 | 151 | LSPLGEEMRDR |
| 1323.621 | 1323.6156 | −.0054 | −4 | 78 | 88 | ETEGLRQEMSK |
| 1380.7158 | 1380.7303 | .0145 | 11 | 97 | 107 | VQPYLDDFQKK |
| 1386.7152 | 1386.7365 | .0213 | 15 | 227 | 238 | VSFLSALEEYTK |
| 1400.6693 | 1400.715 | .0457 | 33 | 28 | 40 | DYVSQFEGSALGK |
| 1411.6675 | 1411.6667 | −.0008 | −1 | 107 | 116 | KWQEEMELYR |
| 1453.707 | 1453.7174 | .0104 | 7 | 1 | 12 | DEPPQSPWDRVK |
| 1467.7914 | 1467.7849 | −.0065 | −4 | 119 | 131 | VEPLRAELQEGAR |
| 1467.7914 | 1467.7849 | −.0065 | −4 | 119 | 131 | VEPLRAELQEGAR |
| 1585.8081 | 1585.8174 | .0093 | 6 | 161 | 173 | THLAPYSDELRQR |
| 1585.8081 | 1585.8174 | .0093 | 6 | 161 | 173 | THLAPYSDELRQR |
| | 1585.8174 | | | | | |
| 1612.7854 | 1612.8048 | .0194 | 12 | 46 | 59 | LLDNWDSVTSTF |
| | | | | | | SK |
| 1650.8698 | 1650.8733 | .0035 | 2 | 13 | 27 | DLATVYVDVLKD |
| | | | | | | SGR |
| 1815.8508 | 1815.8446 | −.0062 | −3 | 24 | 40 | DSGRDYVSQFE |
| | | | | | | GSALGK |
| 1815.8508 | 1815.8446 | −.0062 | −3 | 24 | 40 | DSGRDYVSQFE |
| | | | | | | GSALGK |

| | |
|---|---|
| unnamed protein product [Homo sapiens] | gi\|215415652 |

[0328] Peptide Information

| | | | | Start | End | |
|---|---|---|---|---|---|---|
| Calc. Mass | Obsrv. Mass | ±da | ±ppm | Seq. | Seq. | Sequence |
| 831.4359 | 831.4695 | .0336 | 40 | 189 | 195 | LAEYHAK |
| 869.5203 | 869.5491 | .0288 | 33 | 117 | 123 | QKVEPLR |
| 873.4424 | 873.4709 | .0285 | 33 | 124 | 131 | AELQEGAR |
| 1012.5786 | 1012.6014 | .0228 | 23 | 207 | 215 | AKPALEDLR |
| 1012.5786 | 1012.6014 | .0228 | 23 | 207 | 215 | AKPALEDLR |
| 1226.5437 | 1226.5634 | .0197 | 16 | 1 | 10 | DEPPQSPWDR |
| 1226.5437 | 1226.5634 | .0197 | 16 | 1 | 10 | DEPPQSPWDR |
| 1252.6208 | 1252.6487 | .0279 | 22 | 97 | 106 | VQPYLDDFQK |
| 1283.6273 | 1283.6271 | −.0002 | 0 | 150 | 160 | DCARAHVDALR |
| 1301.6484 | 1301.66 | .0116 | 9 | 161 | 171 | THLAPYSDELR |
| 1301.6484 | 1301.66 | .0116 | 9 | 161 | 171 | THLAPYSDELR |
| 1311.5555 | 1311.5947 | .0392 | 30 | 78 | 88 | ETEGLCQEMSK |
| 1327.5505 | 1327.6265 | .076 | 57 | 78 | 88 | ETEGLCQEMSK |
| 1380.7158 | 1380.7303 | .0145 | 11 | 97 | 107 | VQPYLDDFQKK |
| 1386.7152 | 1386.7365 | .0213 | 15 | 227 | 238 | VSFLSALEEYTK |
| 1400.6693 | 1400.715 | .0457 | 33 | 28 | 40 | DYVSQFEGSALGK |
| 1411.6675 | 1411.6667 | −.0008 | −1 | 107 | 116 | KWQEEMELYR |
| 1453.707 | 1453.7174 | .0104 | 7 | 1 | 12 | DEPPQSPWDRVK |
| 1467.7914 | 1467.7849 | −.0065 | −4 | 119 | 131 | VEPLRAELQEGAR |
| 1467.7914 | 1467.7849 | −.0065 | −4 | 119 | 131 | VEPLRAELQEGAR |
| 1585.8081 | 1585.8174 | .0093 | 6 | 161 | 173 | THLAPYSDELRQR |
| 1585.8081 | 1585.8174 | .0093 | 6 | 161 | 173 | THLAPYSDELRQR |
| 1612.7854 | 1612.8048 | .0194 | 12 | 46 | 59 | LLDNWDSVTSTFSK |
| 1650.8698 | 1650.8733 | .0035 | 2 | 13 | 27 | DLATVYVDVLKDS |
| | | | | | | GR |
| 1815.8508 | 1815.8446 | −.0062 | −3 | 24 | 40 | DSGRDYVSQFEGS |
| | | | | | | ALGK |
| 1815.8508 | 1815.8446 | −.0062 | −3 | 24 | 40 | DSGRDYVSQFEGS |
| | | | | | | ALGK |
| 2202.1189 | 2202.0879 | −.031 | −14 | 60 | 77 | LREQLGPVTQEFW |
| | | | | | | DNLEK |

| | |
|---|---|
| unnamed protein product [Homo sapiens] | gi\|215415640 |

[0329] Peptide Information

| | | | | Start | End | |
|---|---|---|---|---|---|---|
| Calc. Mass | Obsrv. Mass | ±da | ±ppm | Seq. | Seq. | Sequence |
| 831.4359 | 831.4695 | .0336 | 4 | 18 | 19 | LAEYHAK |
| 869.5203 | 869.5491 | .0288 | 33 | 117 | 123 | QKVEPLR |
| 873.4424 | 873.4709 | .0285 | 33 | 124 | 131 | AELQEGAR |
| 1012.5786 | 1012.6014 | .0228 | 23 | 207 | 215 | AKPALEDLR |
| 1012.5786 | 1012.6014 | .0228 | 23 | 207 | 215 | AKPALEDLR |
| 1226.5437 | 1226.5634 | .0197 | 16 | 1 | 10 | DEPPQSPWDR |
| 1226.5437 | 1226.5634 | .0197 | 16 | 1 | 10 | DEPPQSPWDR |
| 1252.6208 | 1252.6487 | .0279 | 22 | 97 | 106 | VQPYLDDFQK |
| 1283.6273 | 1283.6271 | −.0002 | 0 | 150 | 160 | DCARAHVDALR |
| 1301.6484 | 1301.66 | .0116 | 9 | 161 | 171 | THLAPYSDELR |
| 1301.6484 | 1301.66 | .0116 | 9 | 161 | 171 | THLAPYSDELR |
| 1323.621 | 1323.6156 | −.0054 | −4 | 78 | 88 | ETEGLRQEMSK |
| 1380.7158 | 1380.7303 | .0145 | 11 | 97 | 107 | VQPYLDDFQKK |
| 1386.7152 | 1386.7365 | .0213 | 15 | 227 | 238 | VSFLSALEEYTK |
| 1400.6693 | 1400.715 | .0457 | 33 | 28 | 40 | DYVSQFEGSAL |
| | | | | | | GK |
| 1411.6675 | 1411.6667 | −.0008 | −1 | 107 | 116 | KWQEEMELYR |
| 1453.707 | 1453.7174 | .0104 | 7 | 1 | 12 | DEPPQSPWDRVK |
| 1467.7914 | 1467.7849 | −.0065 | −4 | 119 | 131 | VEPLRAELQEGAR |
| 1467.7914 | 1467.7849 | −.0065 | −4 | 119 | 131 | VEPLRAELQEGAR |
| 1585.8081 | 1585.8174 | .0093 | 6 | 161 | 173 | THLAPYSDELRQR |
| 1585.8081 | 1585.8174 | .0093 | 6 | 161 | 173 | THLAPYSDELRQR |
| 1612.7854 | 1612.8048 | .0194 | 12 | 46 | 59 | LLDNWDSVTSTF |
| | | | | | | SK |
| 1650.8698 | 1650.8733 | .0035 | 2 | 13 | 27 | DLATVYVDVLKD |
| | | | | | | SGR |
| 1815.8508 | 1815.8446 | −.0062 | −3 | 24 | 40 | DSGRDYVSQFE |
| | | | | | | GSALGK |
| 1815.8508 | 1815.8446 | −.0062 | −3 | 24 | 40 | DSGRDYVSQFE |
| | | | | | | GSALGK |
| 2202.1189 | 2202.0879 | −.031 | −14 | 60 | 77 | LREQLGPVTQEF |
| | | | | | | WDNLEK |

| | |
|---|---|
| unnamed protein product [Homo sapiens] | gi\|215415648 |

[0330] Peptide Information

| | Obsrv. | | | Start | End | |
|---|---|---|---|---|---|---|
| Calc. Mass | Mass | ±da | ±ppm | Seq. | Seq. | Sequence |
| 831.4359 | 831.4695 | .0336 | 40 | 189 | 195 | LAEYHAK |
| 869.5203 | 869.5491 | .0288 | 33 | 117 | 123 | QKVEPLR |
| 873.4424 | 873.4709 | .0285 | 33 | 124 | 131 | AELQEGAR |
| 1012.5786 | 1012.6014 | .0228 | 23 | 207 | 215 | AKPALEDLR |
| 1012.5786 | 1012.6014 | .0228 | 23 | 207 | 215 | AKPALEDLR |
| 1226.5437 | 1226.5634 | .0197 | 16 | 1 | 10 | DEPPQSPWDR |
| 1226.5437 | 1226.5634 | .0197 | 16 | 1 | 10 | DEPPQSPWDR |
| 1252.6208 | 1252.6487 | .0279 | 22 | 97 | 106 | VQPYLDDFQK |
| 1283.6273 | 1283.6271 | −.0002 | 0 | 150 | 160 | DCARAHVDALR |
| 1301.6484 | 1301.66 | .0116 | 9 | 161 | 171 | THLAPYSDELR |
| 1301.6484 | 1301.66 | .0116 | 9 | 161 | 171 | THLAPYSDELR |
| 1323.621 | 1323.6156 | −.0054 | −4 | 78 | 88 | ETEGLRQEMSK |
| 1380.7158 | 1380.7303 | .0145 | 11 | 97 | 107 | VQPYLDDFQKK |
| 1386.7152 | 1386.7365 | .0213 | 15 | 227 | 238 | VSFLSALEEYTK |
| 1400.6693 | 1400.715 | .0457 | 33 | 28 | 40 | DYVSQFEGSAL |
| | | | | | | GK |
| 1411.6675 | 1411.6667 | −.0008 | −1 | 107 | 116 | KWQEEMELYR |
| 1453.707 | 1453.7174 | .0104 | 7 | 1 | 12 | DEPPQSPWDRVK |
| 1467.7914 | 1467.7849 | −.0065 | −4 | 119 | 131 | VEPLRAELQEGAR |
| 1467.7914 | 1467.7849 | −.0065 | −4 | 119 | 131 | VEPLRAELQEGAR |
| 1585.8081 | 1585.8174 | .0093 | 6 | 161 | 173 | THLAPYSDELRQR |
| 1585.8081 | 1585.8174 | .0093 | 6 | 161 | 173 | THLAPYSDELRQR |
| 1612.7854 | 1612.8048 | .0194 | 12 | 46 | 59 | LLDNWDSVTSTF |
| | | | | | | SK |
| 1650.8698 | 1650.8733 | .0035 | 2 | 13 | 27 | DLATVYVDVLKD |
| | | | | | | SGR |
| 1815.8508 | 1815.8446 | −.0062 | −3 | 24 | 40 | DSGRDYVSQFE |
| | | | | | | GSALGK |
| 1815.8508 | 1815.8446 | −.0062 | −3 | 24 | 40 | DSGRDYVSQFE |
| | | | | | | GSALGK |

| | |
|---|---|
| unnamed protein product [Homo sapiens] | gi\|215415654 |

[0331] Peptide Information

| | Obsrv. | | | Start | End | |
|---|---|---|---|---|---|---|
| Calc. Mass | Mass | ±da | ±ppm | Seq. | Seq. | Sequence |
| 831.4359 | 831.4695 | .0336 | 40 | 189 | 195 | LAEYHAK |
| 869.5203 | 869.5491 | .0288 | 33 | 117 | 123 | QKVEPLR |
| 873.4424 | 873.4709 | .0285 | 33 | 124 | 131 | AELQEGAR |
| 1008.5697 | 1008.5928 | .0231 | 23 | 152 | 160 | ARAHVDALR |
| 1226.5437 | 1226.5634 | .0197 | 16 | 1 | 10 | DEPPQSPWDR |
| 1226.5437 | 1226.5634 | .0197 | 16 | 1 | 10 | DEPPQSPWDR |
| 1252.6208 | 1252.6487 | .0279 | 22 | 97 | 106 | VQPYLDDFQK |
| 1283.5725 | 1283.6271 | .0546 | 43 | 108 | 116 | WQEEMELYR |
| | 1283.6271 | | | | | |
| 1301.6484 | 1301.66 | .0116 | 9 | 161 | 171 | THLAPYSDELR |
| 1301.6484 | 1301.66 | .0116 | 9 | 161 | 171 | THLAPYSDELR |
| 1311.5555 | 1311.5947 | .0392 | 30 | 78 | 88 | ETEGLCQEMSK |
| 1318.642 | 1318.6689 | .0269 | 20 | 141 | 151 | LSPLGEEMRDR |
| 1327.5505 | 1327.6265 | .076 | 57 | 78 | 88 | ETEGLCQEMSK |
| 1380.7158 | 1380.7303 | .0145 | 11 | 97 | 107 | VQPYLDDFQKK |
| 1386.7152 | 1386.7365 | .0213 | 15 | 227 | 238 | VSFLSALEEYTK |
| 1400.6693 | 1400.715 | .0457 | 33 | 28 | 40 | DYVSQFEGSALGK |
| 1411.6675 | 1411.6667 | −.0008 | −1 | 107 | 116 | KWQEEMELYR |
| 1453.707 | 1453.7174 | .0104 | 7 | 1 | 12 | DEPPQSPWDRVK |
| 1467.7914 | 1467.7849 | −.0065 | −4 | 119 | 131 | VEPLRAELQEGAR |
| 1467.7914 | 1467.7849 | −.0065 | −4 | 119 | 131 | VEPLRAELQEGAR |
| 1585.8081 | 1585.8174 | .0093 | 6 | 161 | 173 | THLAPYSDELRQR |
| 1585.8081 | 1585.8174 | .0093 | 6 | 161 | 173 | THLAPYSDELRQR |
| 1612.7854 | 1612.8048 | .0194 | 12 | 46 | 59 | LLDNWDSVTSTFSK |
| 1650.8698 | 1650.8733 | .0035 | 2 | 13 | 27 | DLATVYVDVLKDSGR |
| 1815.8508 | 1815.8446 | −.0062 | −3 | 24 | 40 | DSGRDYVSQFEGSALGK |
| 1815.8508 | 1815.8446 | −.0062 | −3 | 24 | 40 | DSGRDYVSQFEGSALGK |
| 2202.1189 | 2202.0879 | −.031 | −14 | 60 | 77 | LREQLGPVTQEFWDNLEK |

| | |
|---|---|
| unnamed protein product [Homo sapiens] | gi\|215415628 |

[0332] Peptide Information

| | | | | Start | End | |
|---|---|---|---|---|---|---|
| Calc. Mass | Obsrv. Mass | ±da | ±ppm | Seq. | Seq. | Sequence |
| 831.4359 | 831.4695 | .0336 | 40 | 189 | 195 | LAEYHAK |
| 869.5203 | 869.5491 | .0288 | 33 | 117 | 123 | QKVEPLR |
| 873.4424 | 873.4709 | .0285 | 33 | 124 | 131 | AELQEGAR |
| 1008.5697 | 1008.5928 | .0231 | 23 | 152 | 160 | ARAHVDALR |
| 1226.5437 | 1226.5634 | .0197 | 16 | 1 | 10 | DEPPQSPWDR |
| 1226.5437 | 1226.5634 | .0197 | 16 | 1 | 10 | DEPPQSPWDR |
| 1252.6208 | 1252.6487 | .0279 | 22 | 97 | 106 | VQPYLDDFQK |
| 1283.5725 | 1283.6271 | .0546 | 43 | 108 | 116 | WQEEMELYR |
| 1301.6484 | 1301.66 | .0116 | 9 | 161 | 171 | THLAPYSDELR |
| 1301.6484 | 1301.66 | .0116 | 9 | 161 | 171 | THLAPYSDELR |
| 1318.642 | 1318.6689 | .0269 | 20 | 141 | 151 | LSPLGEEMRDR |
| 1323.621 | 1323.6156 | −.0054 | −4 | 78 | 88 | ETEGLRQEMSK |
| 1380.7158 | 1380.7303 | .0145 | 11 | 97 | 107 | VQPYLDDFQKK |
| 1386.7152 | 1386.7365 | .0213 | 15 | 227 | 238 | VSFLSALEEYTK |
| 1400.6693 | 1400.715 | .0457 | 33 | 28 | 40 | DYVSQFEGSAL |
| | | | | | | GK |
| 1411.6675 | 1411.6667 | −.0008 | −1 | 107 | 116 | KWQEEMELYR |
| 1453.707 | 1453.7174 | .0104 | 7 | 1 | 12 | DEPPQSPWDRVK |
| 1467.7914 | 1467.7849 | −.0065 | −4 | 119 | 131 | VEPLRAELQEGAR |
| 1467.7914 | 1467.7849 | −.0065 | −4 | 119 | 131 | VEPLRAELQEGAR |
| 1585.8081 | 1585.8174 | .0093 | 6 | 161 | 173 | THLAPYSDELRQR |
| 1585.8081 | 1585.8174 | .0093 | 6 | 161 | 173 | THLAPYSDELRQR |
| 1612.7854 | 1612.8048 | .0194 | 12 | 46 | 59 | LLDNWDSVTSTF |
| | | | | | | SK |
| 1650.8698 | 1650.8733 | .0035 | 2 | 13 | 27 | DLATVYVDVLKD |
| | | | | | | SGR |
| 1815.8508 | 1815.8446 | −.0062 | −3 | 24 | 40 | DSGRDYVSQFE |
| | | | | | | GSALGK |
| 1815.8508 | 1815.8446 | −.0062 | −3 | 24 | 40 | DSGRDYVSQFE |
| | | | | | | GSALGK |
| 2202.1189 | 2202.0879 | −.031 | −14 | 60 | 77 | LREQLGPVTQEF |
| | | | | | | WDNLE K |

| | |
|---|---|
| unnamed protein product [Homo sapiens] | gi\|215415634 |

[0333] Peptide Information

| | Obsrv. | | | Start | End | |
|---|---|---|---|---|---|---|
| Calc. Mass | Mass | ±da | ±ppm | Seq. | Seq. | Sequence |
| 831.4359 | 831.4695 | .0336 | 40 | 189 | 195 | LAEYHAK |
| 869.5203 | 869.5491 | .0288 | 33 | 117 | 123 | QKVEPLR |
| 873.4424 | 873.4709 | .0285 | 33 | 124 | 131 | AELQEGAR |
| 1008.5697 | 1008.5928 | .0231 | 23 | 152 | 160 | ARAHVDALR |
| 1012.5786 | 1012.6014 | .0228 | 23 | 207 | 215 | AKPALEDLR |
| 1012.5786 | 1012.6014 | .0228 | 23 | 207 | 215 | AKPALEDLR |
| 1252.6208 | 1252.6487 | .0279 | 22 | 97 | 106 | VQPYLDDFQK |
| 1283.5725 | 1283.6271 | .0546 | 43 | 108 | 116 | WQEEMELYR |
| 1301.6484 | 1301.66 | .0116 | 9 | 161 | 171 | THLAPYSDELR |
| 1301.6484 | 1301.66 | .0116 | 9 | 161 | 171 | THLAPYSDELR |
| 1318.642 | 1318.6689 | .0269 | 20 | 141 | 151 | LSPLGEEMRDR |
| 1323.621 | 1323.6156 | −.0054 | −4 | 78 | 88 | ETEGLRQEMSK |
| 1380.7158 | 1380.7303 | .0145 | 11 | 97 | 107 | VQPYLDDFQKK |
| 1386.7152 | 1386.7365 | .0213 | 15 | 227 | 238 | VSFLSALEEYTK |
| 1400.6693 | 1400.715 | .0457 | 33 | 28 | 40 | DYVSQFEGSAL |
| | | | | | | GK |
| 1411.6675 | 1411.6667 | −.0008 | −1 | 107 | 116 | KWQEEMELYR |
| 1467.7914 | 1467.7849 | −.0065 | −4 | 119 | 131 | VEPLRAELQEGAR |
| 1467.7914 | 1467.7849 | −.0065 | −4 | 119 | 131 | VEPLRAELQEGAR |
| | 1467.7849 | | | | | |
| 1585.8081 | 1585.8174 | .0093 | 6 | 161 | 173 | THLAPYSDELRQR |
| 1585.8081 | 1585.8174 | .0093 | 6 | 161 | 173 | THLAPYSDELRQR |
| 1612.7854 | 1612.8048 | .0194 | 12 | 46 | 59 | LLDNWDSVTSTF |
| | | | | | | SK |
| 1650.8698 | 1650.8733 | .0035 | 2 | 13 | 27 | DLATVYVDVLKD |
| | | | | | | SGR |
| 1815.8508 | 1815.8446 | −.0062 | −3 | 24 | 40 | DSGRDYVSQFE |
| | | | | | | GSALGK |
| 1815.8508 | 1815.8446 | −.0062 | −3 | 24 | 40 | DSGRDYVSQFE |
| | | | | | | GSALGK |
| 2202.1189 | 2202.0879 | −.031 | −14 | 60 | 77 | LREQLGPVTQEF |
| | | | | | | WDNLEK |

| | |
|---|---|
| unnamed protein product [Homo sapiens] | gi\|215415650V |

[0334] Peptide Information

| | | | | Start | End | |
|---|---|---|---|---|---|---|
| Calc. Mass | Obsrv. Mass | ±da | ±ppm | Seq. | Seq. | Sequence |
| 831.4359 | 831.4695 | .0336 | 40 | 189 | 195 | LAEYHAK |
| 869.5203 | 869.5491 | .0288 | 33 | 117 | 123 | QKVEPLR |
| 873.4424 | 873.4709 | .0285 | 33 | 124 | 131 | AELQEGAR |
| 1008.5697 | 1008.5928 | .0231 | 23 | 152 | 160 | ARAHVDALR |
| 1012.5786 | 1012.6014 | .0228 | 23 | 207 | 215 | AKPALEDLR |
| 1012.5786 | 1012.6014 | .0228 | 23 | 207 | 215 | AKPALEDLR |
| 1226.5437 | 1226.5634 | .0197 | 16 | 1 | 10 | DEPPQSPWDR |
| 1226.5437 | 1226.5634 | .0197 | 16 | 1 | 10 | DEPPQSPWDR |
| 1252.6208 | 1252.6487 | .0279 | 22 | 97 | 106 | VQPYLDDFQK |
| 1283.5725 | 1283.6271 | .0546 | 43 | 108 | 116 | WQEEMELYR |
| 1301.6484 | 1301.66 | .0116 | 9 | 161 | 171 | THLAPYSDELR |
| 1301.6484 | 1301.66 | .0116 | 9 | 161 | 171 | THLAPYSDELR |
| 1311.5555 | 1311.5947 | .0392 | 30 | 78 | 88 | ETEGLCQEMSK |
| 1318.642 | 1318.6689 | .0269 | 20 | 141 | 151 | LSPLGEEMRDR |
| 1327.5505 | 1327.6265 | .076 | 57 | 78 | 88 | ETEGLCQEMSK |
| 1380.7158 | 1380.7303 | .0145 | 11 | 97 | 107 | VQPYLDDFQKK |
| 1386.7152 | 1386.7365 | .0213 | 15 | 227 | 238 | VSFLSALEEYTK |
| 1400.6693 | 1400.715 | .0457 | 33 | 28 | 40 | DYVSQFEGSALGK |
| 1411.6675 | 1411.6667 | −.0008 | −1 | 107 | 116 | KWQEEMELYR |
| 1453.707 | 1453.7174 | .0104 | 7 | 1 | 12 | DEPPQSPWD |
| | | | | | | RVK |
| 1467.7914 | 1467.7849 | −.0065 | −4 | 119 | 131 | VEPLRAELQE |
| | | | | | | GAR |
| 1467.7914 | 1467.7849 | −.0065 | −4 | 119 | 131 | VEPLRAELQE |
| | | | | | | GAR |
| 1612.7854 | 1612.8048 | .0194 | 12 | 46 | 59 | LLDNWDSVTS |
| | | | | | | TFSK |
| 1650.8698 | 1650.8733 | .0035 | 2 | 13 | 27 | DLATVYVDVL |
| | | | | | | KDSGR |
| 1815.8508 | 1815.8446 | −.0062 | −3 | 24 | 40 | DSGRDYVSQFE |
| | | | | | | GSALGK |
| 1815.8508 | 1815.8446 | −.0062 | −3 | 24 | 40 | DSGRDYVSQFE |
| | | | | | | GSALGK |
| 2202.1189 | 2202.0879 | −.031 | −14 | 60 | 77 | LREQLGPVTQEF |
| | | | | | | WDNLEK |

| | |
|---|---|
| unnamed protein product [Homo sapiens] | gi\|215415626 |

[0335] Peptide Information

| | | | | Start | End | |
|---|---|---|---|---|---|---|
| Calc. Mass | Obsrv. Mass | ±da | ±ppm | Seq. | Seq. | Sequence |
| 831.4359 | 831.4695 | .0336 | 40 | 189 | 195 | LAEYHAK |
| 1008.5697 | 1008.5928 | .0231 | 23 | 152 | 160 | ARAHVDALR |
| 1012.5786 | 1012.6014 | .0228 | 23 | 207 | 215 | AKPALEDLR |
| 1012.5786 | 1012.6014 | .0228 | 23 | 207 | 215 | AKPALEDLR |
| 1226.5437 | 1226.5634 | .0197 | 16 | 1 | 10 | DEPPQSPWDR |
| 1226.5437 | 1226.5634 | .0197 | 16 | 1 | 10 | DEPPQSPWDR |
| 1252.6208 | 1252.6487 | .0279 | 22 | 97 | 106 | VQPYLDDFQK |
| 1283.5725 | 1283.6271 | .0546 | 43 | 108 | 116 | WQEEMELYR |
| 1301.6484 | 1301.66 | .0116 | 9 | 161 | 171 | THLAPYSDELR |
| 1301.6484 | 1301.66 | .0116 | 9 | 161 | 171 | THLAPYSDELR |
| 1318.642 | 1318.6689 | .0269 | 20 | 141 | 151 | LSPLGEEMRDR |
| 1323.621 | 1323.6156 | −.0054 | −4 | 78 | 88 | ETEGLRQEMSK |
| 1380.7158 | 1380.7303 | .0145 | 11 | 97 | 107 | VQPYLDDFQKK |
| 1386.7152 | 1386.7365 | .0213 | 15 | 227 | 238 | VSFLSALEEYTK |
| 1400.6693 | 1400.715 | .0457 | 33 | 28 | 40 | DYVSQFEGSALGK |
| 1411.6675 | 1411.6667 | −.0008 | −1 | 107 | 116 | KWQEEMELYR |
| 1453.707 | 1453.7174 | .0104 | 7 | 1 | 12 | DEPPQSPWDRVK |
| 1585.8081 | 1585.8174 | .0093 | 6 | 161 | 173 | THLAPYSDELRQR |
| 1585.8081 | 1585.8174 | .0093 | 6 | 161 | 173 | THLAPYSDELRQR |
| 1612.7854 | 1612.8048 | .0194 | 12 | 46 | 59 | LLDNWDSVTSTFSK |
| 1650.8698 | 1650.8733 | .0035 | 2 | 13 | 27 | DLATVYVDVLKDS |
| | | | | | | GR |
| 1815.8508 | 1815.8446 | −.0062 | −3 | 24 | 40 | DSGRDYVSQFEGS |
| | | | | | | ALGK |
| 1815.8508 | 1815.8446 | −.0062 | −3 | 24 | 40 | DSGRDYVSQFEGS |
| | | | | | | ALGK |
| 2202.1189 | 2202.0879 | −.031 | −14 | 60 | 77 | LREQLGPVTQEFW |
| | | | | | | DNLEK |

| | |
|---|---|
| proapolipoprotein [Homo sapiens] | gi\|178775 |

[0336] Peptide Information

| | Obsrv. | | | Start | End | |
|---|---|---|---|---|---|---|
| Calc. Mass | Mass | ±da | ±ppm | Seq. | Seq. | Sequence |
| 831.4359 | 831.4695 | .0336 | 40 | 195 | 201 | LAEYHAK |
| 869.5203 | 869.5491 | .0288 | 33 | 123 | 129 | QKVEPLR |
| 873.4424 | 873.4709 | .0285 | 33 | 130 | 137 | AELQEGAR |
| 1008.5697 | 1008.5928 | .0231 | 23 | 158 | 166 | ARAHVDALR |
| 1012.5786 | 1012.6014 | .0228 | 23 | 213 | 221 | AKPALEDLR |
| 1012.5786 | 1012.6014 | .0228 | 23 | 213 | 221 | AKPALEDLR |
| 1252.6208 | 1252.6487 | .0279 | 22 | 103 | 112 | VQPYLDDFQK |
| 1283.5725 | 1283.6271 | .0546 | 43 | 114 | 122 | WQEEMELYR |
| 1301.6484 | 1301.66 | .0116 | 9 | 167 | 177 | THLAPYSDELR |
| 1301.6484 | 1301.66 | .0116 | 9 | 167 | 177 | THLAPYSDELR |
| 1318.642 | 1318.6689 | .0269 | 20 | 147 | 157 | LSPLGEEMRDR |
| 1323.621 | 1323.6156 | −.0054 | −4 | 84 | 94 | ETEGLRQEMSK |
| 1380.7158 | 1380.7303 | .0145 | 11 | 103 | 113 | VQPYLDDFQKK |
| 1386.7152 | 1386.7365 | .0213 | 15 | 233 | 244 | VSFLSALEEYTK |
| 1400.6693 | 1400.715 | .0457 | 33 | 34 | 46 | DYVSQFEGSAL |
| | | | | | | GK |
| 1411.6675 | 1411.6667 | −.0008 | −1 | 113 | 122 | KWQEEMELYR |
| 1467.7914 | 1467.7849 | −.0065 | −4 | 125 | 137 | VEPLRAELQEGAR |
| 1467.7914 | 1467.7849 | −.0065 | −4 | 125 | 137 | VEPLRAELQEGAR |
| 1585.8081 | 1585.8174 | .0093 | 6 | 167 | 179 | THLAPYSDELRQR |
| 1585.8081 | 1585.8174 | .0093 | 6 | 167 | 179 | THLAPYSDELRQR |
| 1612.7854 | 1612.8048 | .0194 | 12 | 52 | 65 | LLDNWDSVTSTF |
| | | | | | | SK |
| 1650.8698 | 1650.8733 | .0035 | 2 | 19 | 33 | DLATVYVDVLKD |
| | | | | | | SGR |
| 1815.8508 | 1815.8446 | −.0062 | −3 | 30 | 46 | DSGRDYVSQFE |
| | | | | | | GSALGK |
| 1815.8508 | 1815.8446 | −.0062 | −3 | 30 | 46 | DSGRDYVSQFE |
| | | | | | | GSALGK |
| 2202.1189 | 2202.0879 | −.031 | −14 | 66 | 83 | LREQLGPVTQEF |
| | | | | | | WDNLEK |

| | |
|---|---|
| unnamed protein product [Homo sapiens] | gi\|215415624 |

[0337] Peptide Information

| | | | | Start | End | |
|---|---|---|---|---|---|---|
| Calc. Mass | Obsrv. Mass | ±da | ±ppm | Seq. | Seq. | Sequence |
| 831.4359 | 831.4695 | .0336 | 40 | 189 | 195 | LAEYHAK |
| 869.5203 | 869.5491 | .0288 | 33 | 117 | 123 | QKVEPLR |
| 873.4424 | 873.4709 | .0285 | 33 | 124 | 131 | AELQEGAR |
| 1008.5697 | 1008.5928 | .0231 | 23 | 152 | 160 | ARAHVDALR |
| 1012.5786 | 1012.6014 | .0228 | 23 | 207 | 215 | AKPALEDLR |
| 1012.5786 | 1012.6014 | .0228 | 23 | 207 | 215 | AKPALEDLR |
| 1226.5437 | 1226.5634 | .0197 | 16 | 1 | 10 | DEPPQSP |
| | | | | | | WDR |
| 1226.5437 | 1226.5634 | .0197 | 16 | 1 | 10 | DEPPQSP |
| | | | | | | WDR |
| 1252.6208 | 1252.6487 | .0279 | 22 | 97 | 106 | VQPYLDD |
| | | | | | | FQK |
| 1283.5725 | 1283.6271 | .0546 | 43 | 108 | 116 | WQEEMEL |
| | | | | | | YR |
| 1301.6484 | 1301.66 | .0116 | 9 | 161 | 171 | THLAPYSD |
| | | | | | | ELR |
| 1301.6484 | 1301.66 | .0116 | 9 | 161 | 171 | THLAPYSDELR |
| 1318.642 | 1318.6689 | .0269 | 20 | 141 | 151 | LSPLGEEMRDR |
| 1323.621 | 1323.6156 | −.0054 | −4 | 78 | 88 | ETEGLRQEMSK |
| 1380.7158 | 1380.7303 | .0145 | 11 | 97 | 107 | VQPYLDDFQKK |
| 1386.7152 | 1386.7365 | .0213 | 15 | 227 | 238 | VSFLSALEEYTK |
| 1400.6693 | 1400.715 | .0457 | 33 | 28 | 40 | DYVSQFEGSAL |
| | | | | | | GK |
| 1411.6675 | 1411.6667 | −.0008 | −1 | 107 | 116 | KWQEEMELYR |
| 1453.707 | 1453.7174 | .0104 | 7 | 1 | 12 | DEPPQSPWDRVK |
| 1467.7914 | 1467.7849 | −.0065 | −4 | 119 | 131 | VEPLRAELQEGAR |
| 1467.7914 | 1467.7849 | −.0065 | −4 | 119 | 131 | VEPLRAELQEGAR |
| 1612.7854 | 1612.8048 | .0194 | 12 | 46 | 59 | LLDNWDSVTSTF |
| | | | | | | SK |
| 1650.8698 | 1650.8733 | .0035 | 2 | 13 | 27 | DLATVYVDVLKD |
| | | | | | | SGR |
| 1815.8508 | 1815.8446 | −.0062 | −3 | 24 | 40 | DSGRDYVSQFE |
| | | | | | | GSALGK |
| 1815.8508 | 1815.8446 | −.0062 | −3 | 24 | 40 | DSGRDYVSQFE |
| | | | | | | GSALGK |
| 2202.1189 | 2202.0879 | −.031 | −14 | 60 | 77 | LREQLGPVTQEF |
| | | | | | | WDNLE K |

| | |
|---|---|
| unnamed protein product [Homo sapiens] | gi\|215415646 |

[0338] Peptide Information

| | Obsrv. | | | Start | End | |
|---|---|---|---|---|---|---|
| Calc. Mass | Mass | ±da | ±ppm | Seq. | Seq. | Sequence |
| 831.4359 | 831.4695 | .0336 | 40 | 189 | 195 | LAEYHAK |
| 869.5203 | 869.5491 | .0288 | 33 | 117 | 123 | QKVEPLR |
| 873.4424 | 873.4709 | .0285 | 33 | 124 | 131 | AELQEGAR |
| 1008.5697 | 1008.5928 | .0231 | 23 | 152 | 160 | ARAHVDALR |
| 1226.5437 | 1226.5634 | .0197 | 16 | 1 | 10 | DEPPQSPWDR |
| 1226.5437 | 1226.5634 | .0197 | 16 | 1 | 10 | DEPPQSPWDR |
| 1252.6208 | 1252.6487 | .0279 | 22 | 97 | 106 | VQPYLDDFQK |
| 1283.5725 | 1283.6271 | .0546 | 43 | 108 | 116 | WQEEMELYR |
| 1301.6484 | 1301.66 | .0116 | 9 | 161 | 171 | THLAPYSDELR |
| 1301.6484 | 1301.66 | .0116 | 9 | 161 | 171 | THLAPYSDELR |
| 1318.642 | 1318.6689 | .0269 | 20 | 141 | 151 | LSPLGEEMRDR |
| 1323.621 | 1323.6156 | −.0054 | −4 | 78 | 88 | ETEGLRQEMSK |
| | 1323.6156 | | | | | |
| 1380.7158 | 1380.7303 | .0145 | 11 | 97 | 107 | VQPYLDDFQKK |
| 1386.7152 | 1386.7365 | .0213 | 15 | 227 | 238 | VSFLSALEEYTK |
| 1400.6693 | 1400.715 | .0457 | 33 | 28 | 40 | DYVSQFEGSALGK |
| 1411.6675 | 1411.6667 | −.0008 | −1 | 107 | 116 | KWQEEMELYR |
| 1453.707 | 1453.7174 | .0104 | 7 | 1 | 12 | DEPPQSPWDRVK |
| 1467.7914 | 1467.7849 | −.0065 | −4 | 119 | 131 | VEPLRAELQEGAR |
| 1467.7914 | 1467.7849 | −.0065 | −4 | 119 | 131 | VEPLRAELQEGAR |
| 1585.8081 | 1585.8174 | .0093 | 6 | 161 | 173 | THLAPYSDELRQR |
| 1585.8081 | 1585.8174 | .0093 | 6 | 161 | 173 | THLAPYSDELRQR |
| 1612.7854 | 1612.8048 | .0194 | 12 | 46 | 59 | LLDNWDSVTSTFSK |
| 1650.8698 | 1650.8733 | .0035 | 2 | 13 | 27 | DLATVYVDVLKDSGR |
| 1815.8508 | 1815.844 | −.0062 | −3 | 2 | 40 | DSGRDYVSQFE |
| 1815.8508 | 1815.844 | −.0062 | −3 | 2 | 40 | DSGRDYVSQFE |

| | |
|---|---|
| apolipoprotein A-I preproprotein [Homo sapiens] | gi\|4557321 |

[0339] Protein Group

| | |
|---|---|
| ApoA-I [Homo sapiens] | gi\|296729 |
| Apolipoprotein A-I [Homo sapiens] | gi\|82571472 |
| Apolipoprotein A-I [Homo sapiens] | gi\|13529242 |
| RecName: Full = Apolipoprotein A-I; Short = Apo-AI; | gi\|113992 |
| Short = ApoA-I; AltName: Full = Apolipoprotein A1; | |
| Contains: RecName: Full = Apolipoprotein | |
| A-I(1-242); Flags: Precursor | |
| apolipoprotein A-I [Homo sapiens] | gi\|37499465 |
| apolipoprotein A-I [Homo sapiens] | gi\|45593391 |
| apolipoprotein A-I precursor variant 1 [Homo sapiens] | gi\|167887482 |
| apolipoprotein A-I precursor variant 2 [Homo sapiens] | gi\|167887483 |
| apolipoprotein A-I precursor variant 3 [Homo sapiens] | gi\|167887484 |
| apolipoprotein A-I precursor variant 4 [Homo sapiens] | gi\|167887485 |
| apolipoprotein A-I precursor variant 5 [Homo sapiens] | gi\|167887486 |
| apolipoprotein A-I, isoform CRA_a [Homo sapiens] | gi\|119587680 |
| apolipoprotein A-I, isoform CRA_a [Homo sapiens] | gi\|119587679 |
| apolipoprotein A-I, isoform CRA_a [Homo sapiens] | gi\|119587678 |
| apolipoprotein AI precursor [Homo sapiens] | gi\|296635 |
| apolipoprotein AI precursor [Homo sapiens] | |
| preproapolipoprotein A-I [Homo sapiens] | gi\|178768 |
| preproapolipoprotein AI [Homo sapiens] | gi\|28772 |
| preproapolipoprotein [Homo sapiens] | gi\|512410 |
| proapolipoprotein [Homo sapiens] | gi\|178773 |
| unnamed protein product [Homo sapiens] | gi\|732753 |
| unnamed protein product [Homo sapiens] | gi\|158257894 |

[0340] Peptide Information

| | | | | Start | End | |
|---|---|---|---|---|---|---|
| Calc. Mass | Obsrv. Mass | ±da | ±ppm | Seq. | Seq. | Sequence |
| 831.4359 | 831.4695 | .0336 | 40 | 213 | 219 | LAEYHAK |
| 869.5203 | 869.5491 | .0288 | 33 | 141 | 147 | QKVEPLR |
| 873.4424 | 873.4709 | .0285 | 33 | 148 | 155 | AELQEGAR |
| 1008.5697 | 1008.5928 | .0231 | 23 | 176 | 184 | ARAHVDALR |
| 1012.5786 | 1012.6014 | .0228 | 23 | 231 | 239 | AKPALEDLR |
| 1012.5786 | 1012.6014 | .0228 | 23 | 231 | 239 | AKPALEDLR |
| 1252.6208 | 1252.6487 | .0279 | 22 | 121 | 130 | VQPYLDDFQK |
| 1283.5725 | 1283.6271 | .0546 | 43 | 132 | 140 | WQEEMELYR |
| 1301.6484 | 1301.66 | .0116 | 9 | 185 | 195 | THLAPYSDELR |
| 1301.6484 | 1301.66 | .0116 | 9 | 185 | 195 | THLAPYSDELR |
| 1318.642 | 1318.6689 | .0269 | 20 | 165 | 175 | LSPLGEEMRDR |
| 1323.621 | 1323.6156 | −.0054 | −4 | 102 | 112 | ETEGLRQEMSK |
| 1380.7158 | 1380.7303 | .0145 | 11 | 121 | 131 | VQPYLDDFQKK |
| 1386.7152 | 1386.7365 | .0213 | 15 | 251 | 262 | VSFLSALEEYTK |
| 1400.6693 | 1400.715 | .0457 | 33 | 52 | 64 | DYVSQFEGSAL |
| | | | | | | GK |
| 1411.6675 | 1411.6667 | −.0008 | −1 | 131 | 140 | KWQEEMELYR |
| 1467.7914 | 1467.7849 | −.0065 | −4 | 143 | 155 | VEPLRAELQEGAR |
| 1467.7914 | 1467.7849 | −.0065 | −4 | 143 | 155 | VEPLRAELQEGAR |
| 1585.8081 | 1585.8174 | .0093 | 6 | 185 | 197 | THLAPYSDELRQR |
| 1585.8081 | 1585.8174 | .0093 | 6 | 185 | 197 | THLAPYSDELRQR |
| 1612.7854 | 1612.8048 | .0194 | 12 | 70 | 83 | LLDNWDSVTSTF |
| | | | | | | SK |
| 1650.8698 | 1650.8733 | .0035 | 2 | 37 | 51 | DLATVYVDVLKD |
| | | | | | | SGR |
| 1815.8508 | 1815.8446 | −.0062 | −3 | 48 | 64 | DSGRDYVSQFE |
| | | | | | | GSALGK |
| 1815.8508 | 1815.8446 | −.0062 | −3 | 48 | 64 | DSGRDYVSQFE |
| | | | | | | GSALGK |
| 2202.1189 | 2202.0879 | −.031 | −14 | 84 | 101 | LREQLGPVTQEF |
| | | | | | | WDNLEK |

| | |
|---|---|
| unnamed protein product [Homo sapiens] | gi\|15415644 |

[0341] Peptide Information

| | | | | Start | End | |
|---|---|---|---|---|---|---|
| Calc. Mass | Obsrv. Mass | ±da | ±ppm | Seq. | Seq. | Sequence |
| 831.4359 | 831.4695 | .0336 | 40 | 189 | 195 | LAEYHAK |
| 869.5203 | 869.5491 | .0288 | 33 | 117 | 123 | QKVEPLR |
| 873.4424 | 873.4709 | .0285 | 33 | 124 | 131 | AELQEGAR |
| 1008.5697 | 1008.5928 | .0231 | 23 | 152 | 160 | ARAHVDALR |
| 1012.5786 | 1012.6014 | .0228 | 23 | 207 | 215 | AKPALEDLR |
| 1012.5786 | 1012.6014 | .0228 | 23 | 207 | 215 | AKPALEDLR |
| 1226.5437 | 1226.5634 | .0197 | 16 | 1 | 10 | DEPPQSPWDR |
| 1226.5437 | 1226.5634 | .0197 | 16 | 1 | 10 | DEPPQSPWDR |
| 1252.6208 | 1252.6487 | .0279 | 22 | 97 | 106 | VQPYLDDFQK |
| 1283.5725 | 1283.6271 | .0546 | 43 | 108 | 116 | WQEEMELYR |
| 1301.6484 | 1301.66 | .0116 | 9 | 161 | 171 | THLAPYSDELR |
| 1301.6484 | 1301.66 | .0116 | 9 | 161 | 171 | THLAPYSDELR |
| 1318.642 | 1318.6689 | .0269 | 20 | 141 | 151 | LSPLGEEMRDR |
| 1323.621 | 1323.6156 | −.0054 | −4 | 78 | 88 | ETEGLRQEMSK |
| 1380.7158 | 1380.7303 | .0145 | 11 | 97 | 107 | VQPYLDDFQKK |
| 1386.7152 | 1386.7365 | .0213 | 15 | 227 | 238 | VSFLSALEEYTK |
| 1400.6693 | 1400.715 | .0457 | 33 | 28 | 40 | DYVSQFEGSALGK |
| 1411.6675 | 1411.6667 | −.0008 | −1 | 107 | 116 | KWQEEMELYR |
| 1453.707 | 1453.7174 | .0104 | 7 | 1 | 12 | DEPPQSPWDRVK |
| 1467.7914 | 1467.7849 | −.0065 | −4 | 119 | 131 | VEPLRAELQEGAR |
| 1467.7914 | 1467.7849 | −.0065 | −4 | 119 | 131 | VEPLRAELQEGAR |
| 1612.7854 | 1612.8048 | .0194 | 12 | 46 | 59 | LLDNWDSVTSTFSK |
| 1650.8698 | 1650.8733 | .0035 | 2 | 13 | 27 | DLATVYVDVLKDS |
| | | | | | | GR |
| 1815.8508 | 1815.8446 | −.0062 | −3 | 24 | 40 | DSGRDYVSQFEGS |
| | | | | | | ALGK |
| 1815.8508 | 1815.8446 | −.0062 | −3 | 24 | 40 | DSGRDYVSQFEGS |
| | | | | | | ALGK |

| | |
|---|---|
| unnamed protein product [Homo | gi\|215415658 |
| sapiens] | |

[0342] Peptide Information

| | | | | Start | End | |
|---|---|---|---|---|---|---|
| Calc. Mass | Obsrv. Mass | ±da | ±ppm | Seq. | Seq. | Sequence |
| 831.4359 | 831.4695 | .0336 | 40 | 189 | 195 | LAEYHAK |
| 869.5203 | 869.5491 | .0288 | 33 | 117 | 123 | QKVEPLR |
| 873.4424 | 873.4709 | .0285 | 33 | 124 | 131 | AELQEGAR |
| 1226.5437 | 1226.5634 | .0197 | 16 | 1 | 10 | DEPPQSPWDR |
| 1226.5437 | 1226.5634 | .0197 | 16 | 1 | 10 | DEPPQSPWDR |
| | 1226.5634 | | | | | |
| 1252.6208 | 1252.6487 | .0279 | 22 | 97 | 106 | VQPYLDDFQK |
| 1283.6273 | 1283.6271 | −.0002 | 0 | 150 | 160 | DCARAHVDALR |
| 1301.6484 | 1301.66 | .0116 | 9 | 161 | 171 | THLAPYSDELR |
| 1301.6484 | 1301.66 | .0116 | 9 | 161 | 171 | THLAPYSDELR |
| 1323.621 | 1323.6156 | −.0054 | −4 | 78 | 88 | ETEGLRQEMSK |
| 1380.7158 | 1380.7303 | .0145 | 11 | 97 | 107 | VQPYLDDFQKK |
| 1386.7152 | 1386.7365 | .0213 | 15 | 227 | 238 | VSFLSALEEYTK |
| 1400.6693 | 1400.715 | .0457 | 33 | 28 | 40 | DYVSQFEGSALGK |
| 1411.6675 | 1411.6667 | −.0008 | −1 | 107 | 116 | KWQEEMELYR |
| 1453.707 | 1453.7174 | .0104 | 7 | 1 | 12 | DEPPQSPWDRVK |
| 1467.7914 | 1467.7849 | −.0065 | −4 | 119 | 131 | VEPLRAELQEGAR |
| 1467.7914 | 1467.7849 | −.0065 | −4 | 119 | 131 | VEPLRAELQEGAR |
| 1585.8081 | 1585.8174 | .0093 | 6 | 161 | 173 | THLAPYSDELRQR |
| 1585.8081 | 1585.8174 | .0093 | 6 | 161 | 173 | THLAPYSDELRQR |
| 1612.7854 | 1612.8048 | .0194 | 12 | 46 | 59 | LLDNWDSVTSTFSK |
| 1650.8698 | 1650.8733 | .0035 | 2 | 13 | 27 | DLATVYVDVLKDS |
| | | | | | | GR |
| 1815.8508 | 1815.8446 | −.0062 | −3 | 24 | 40 | DSGRDYVSQFEGS |
| | | | | | | ALGK |
| 1815.8508 | 1815.8446 | −.0062 | −3 | 24 | 40 | DSGRDYVSQFEGS |
| | | | | | | ALGK |
| 2202.1189 | 2202.0879 | −.031 | −14 | 60 | 77 | LREQLGPVTQEFW |
| | | | | | | DNLEK |

| | |
|---|---|
| unnamed protein product [Homo sapiens] | gi\|215415656 |

[0343] Peptide Information

| | | | | Start | End | |
|---|---|---|---|---|---|---|
| Calc. Mass | Obsrv. Mass | ±da | ±ppm | Seq. | Seq. | Sequence |
| 831.4359 | 831.4695 | .0336 | 40 | 189 | 195 | LAEYHAK |
| 869.5203 | 869.5491 | .0288 | 33 | 117 | 123 | QKVEPLR |
| 873.4424 | 873.4709 | .0285 | 33 | 124 | 131 | AELQEGAR |
| 1012.5786 | 1012.6014 | .0228 | 23 | 207 | 215 | AKPALEDLR |
| 1012.5786 | 1012.6014 | .0228 | 23 | 207 | 215 | AKPALEDLR |
| 1226.5437 | 1226.5634 | .0197 | 16 | 1 | 10 | DEPPQSPWDR |
| 1226.5437 | 1226.5634 | .0197 | 16 | 1 | 10 | DEPPQSP |
| | | | | | | WDR |
| 1252.6208 | 1252.6487 | .0279 | 22 | 97 | 106 | VQPYLDDF |
| | | | | | | QK |
| 1283.6273 | 1283.6271 | −.0002 | 0 | 150 | 160 | DCARAHV |
| | | | | | | DALR |
| 1301.6484 | 1301.66 | .0116 | 9 | 161 | 171 | THLAPYSD |
| | | | | | | ELR |
| 1301.6484 | 1301.66 | .0116 | 9 | 161 | 171 | THLAPYSD |
| | | | | | | ELR |
| 1323.621 | 1323.6156 | −.0054 | −4 | 78 | 88 | ETEGLRQE |
| | | | | | | MSK |
| 1380.7158 | 1380.7303 | .0145 | 11 | 97 | 107 | VQPYLDDFQKK |
| 1386.7152 | 1386.7365 | .0213 | 15 | 227 | 238 | VSFLSALEEYTK |
| 1400.6693 | 1400.715 | .0457 | 33 | 28 | 40 | DYVSQFEGSAL |
| | | | | | | GK |
| 1411.6675 | 1411.6667 | −.0008 | −1 | 107 | 116 | KWQEEMELYR |
| 1453.707 | 1453.7174 | .0104 | 7 | 1 | 12 | DEPPQSPWDRVK |
| 1467.7914 | 1467.7849 | −.0065 | −4 | 119 | 131 | VEPLRAELQEGAR |
| 1467.7914 | 1467.7849 | −.0065 | −4 | 119 | 131 | VEPLRAELQEGAR |
| 1612.7854 | 1612.8048 | .0194 | 12 | 46 | 59 | LLDNWDSVTSTF |
| | | | | | | SK |
| 1650.8698 | 1650.8733 | .0035 | 2 | 13 | 27 | DLATVYVDVLKD |
| | | | | | | SGR |
| 1815.8508 | 1815.8446 | −.0062 | −3 | 24 | 40 | DSGRDYVSQFE |
| | | | | | | GSALGK |
| 1815.8508 | 1815.8446 | −.0062 | −3 | 24 | 40 | DSGRDYVSQFE |
| | | | | | | GSALGK |
| 2202.1189 | 2202.0879 | −.031 | −14 | 60 | 77 | LREQLGPVTQEF |
| | | | | | | WDNLEK |

| | |
|---|---|
| proapo-A-I protein [Homo sapiens] | gi\|178777 |

[0344] Peptide Information

| | | | | Start | End | |
|---|---|---|---|---|---|---|
| Calc. Mass | Obsrv. Mass | ±da | ±ppm | Seq. | Seq. | Sequence |
| 831.4359 | 831.4695 | .0336 | 40 | 213 | 219 | LAEYHAK |
| 873.4424 | 873.4709 | .0285 | 33 | 148 | 155 | AELQEGAR |
| 1008.5697 | 1008.5928 | .0231 | 23 | 176 | 184 | ARAHVDALR |
| 1012.5786 | 1012.6014 | .0228 | 23 | 231 | 239 | AKPALEDLR |
| 1012.5786 | 1012.6014 | .0228 | 23 | 231 | 239 | AKPALEDLR |
| 1252.6208 | 1252.6487 | .0279 | 22 | 121 | 130 | VQPYLDDFQK |
| 1283.5725 | 1283.6271 | .0546 | 43 | 132 | 140 | WQEEMELYR |
| 1301.6484 | 1301.66 | .0116 | 9 | 185 | 195 | THLAPYSDELR |
| 1301.6484 | 1301.66 | .0116 | 9 | 185 | 195 | THLAPYSDELR |
| 1318.642 | 1318.6689 | .0269 | 20 | 165 | 175 | LSPLGEEMRDR |
| 1323.621 | 1323.6156 | −.0054 | −4 | 102 | 112 | ETEGLRQEMSK |
| 1380.7158 | 1380.7303 | .0145 | 11 | 121 | 131 | VQPYLDDFQKK |
| 1386.7152 | 1386.7365 | .0213 | 15 | 251 | 262 | VSFLSALEEYTK |
| 1400.6693 | 1400.715 | .0457 | 33 | 52 | 64 | DYVSQFEGSALGK |
| 1411.6675 | 1411.6667 | −.0008 | −1 | 131 | 140 | KWQEEMELYR |
| 1453.7758 | 1453.7174 | −.0584 | −40 | 143 | 155 | VDPLRAELQEGAR |
| 1585.8081 | 1585.8174 | .0093 | 6 | 185 | 197 | THLAPYSDELRQR |
| 1585.8081 | 1585.8174 | .0093 | 6 | 185 | 197 | THLAPYSDELRQR |
| 1612.7854 | 1612.8048 | .0194 | 12 | 70 | 83 | LLDNWDSVTSTFSK |
| 1650.8698 | 1650.8733 | .0035 | 2 | 37 | 51 | DLATVYVDVLKDS |
| | | | | | | GR |
| | 1650.8733 | | | | | |
| 1815.8508 | 1815.8446 | −.0062 | −3 | 48 | 64 | DSGRDYVSQFE |
| | | | | | | GSALGK |
| 1815.8508 | 1815.8446 | −.0062 | −3 | 48 | 64 | DSGRDYVSQFE |
| | | | | | | GSALGK |
| 2202.1189 | 2202.0879 | −.031 | −14 | 84 | 101 | LREQLGPVTQE |
| | | | | | | FWDNLE K |

| | |
|---|---|
| unnamed protein product [Homo sapiens] | gi\|215415642 |

[0345] Peptide Information

| | | | | Start | End | |
|---|---|---|---|---|---|---|
| Calc. Mass | Obsrv. Mass | ±da | ±ppm | Seq. | Seq. | Sequence |
| 831.4359 | 831.4695 | .0336 | 40 | 189 | 195 | LAEYHAK |
| 869.5203 | 869.5491 | .0288 | 33 | 117 | 123 | QKVEPLR |
| 873.4424 | 873.4709 | .0285 | 33 | 124 | 131 | AELQEGAR |
| 1008.5697 | 1008.5928 | .0231 | 23 | 152 | 160 | ARAHVDALR |
| 1252.6208 | 1252.6487 | .0279 | 22 | 97 | 106 | VQPYLDDFQK |
| 1283.5725 | 1283.6271 | .0546 | 43 | 108 | 116 | WQEEMELYR |
| 1301.6484 | 1301.66 | .0116 | 9 | 161 | 171 | THLAPYSDELR |
| 1301.6484 | 1301.66 | .0116 | 9 | 161 | 171 | THLAPYSDELR |
| 1318.642 | 1318.6689 | .0269 | 20 | 141 | 151 | LSPLGEEMRDR |
| 1323.621 | 1323.6156 | −.0054 | −4 | 78 | 88 | ETEGLRQEMSK |
| 1380.7158 | 1380.7303 | .0145 | 11 | 97 | 107 | VQPYLDDFQKK |
| 1386.7152 | 1386.7365 | .0213 | 15 | 227 | 238 | VSFLSALEEYTK |
| 1400.6693 | 1400.715 | .0457 | 33 | 28 | 40 | DYVSQFEGSALGK |
| 1411.6675 | 1411.6667 | −.0008 | −1 | 107 | 116 | KWQEEMELYR |
| 1467.7914 | 1467.7849 | −.0065 | −4 | 119 | 131 | VEPLRAELQEGAR |
| 1467.7914 | 1467.7849 | −.0065 | −4 | 119 | 131 | VEPLRAELQEGAR |
| 1585.8081 | 1585.8174 | .0093 | 6 | 161 | 173 | THLAPYSDELRQR |
| 1585.8081 | 1585.8174 | .0093 | 6 | 161 | 173 | THLAPYSDELRQR |
| 1612.7854 | 1612.8048 | .0194 | 12 | 46 | 59 | LLDNWDSVTSTFSK |
| 1650.8698 | 1650.8733 | .0035 | 2 | 13 | 27 | DLATVYVDVLKDS |
| | | | | | | GR |
| 1815.8508 | 1815.8446 | −.0062 | −3 | 24 | 40 | DSGRDYVSQFEGS |
| | | | | | | ALGK |
| 1815.8508 | 1815.8446 | −.0062 | −3 | 24 | 40 | DSGRDYVSQFEGS |
| | | | | | | ALGK |
| 2202.1189 | 2202.0879 | −.031 | −14 | 60 | 77 | LREQLGPVTQEFW |
| | | | | | | DNLE |

| | | | |
|---|---|---|---|
| | 63/C12 | | Instr./Gel Origin |
| | [1] Sample Project | | Instrument |
| | 20110503 | | Sample |
| | | | Name |
| Protein Name - | KH12 | Accession No. | |

| | |
|---|---|
| unnamed protein product [Homo | gi\|189066554 |
| sapiens] | |

[0346] Peptide Information

| | | | | Start | End | |
|---|---|---|---|---|---|---|
| Calc. Mass | Obsrv. Mass | ±da | ±ppm | Seq. | Seq. | Sequence |
| 836.4009 | 836.415 | .0141 | 17 | 218 | 224 | GQQYQGR |
| 836.4009 | 836.415 | .0141 | 17 | 218 | 224 | GQQYQGR |
| 874.4781 | 874.4888 | .0107 | 12 | 501 | 508 | VTGWGNLK |
| 951.4894 | 951.5774 | .088 | 92 | 434 | 440 | YERNIEK |
| 971.425 | 971.4321 | .0071 | 7 | 87 | 94 | YTACETAR |
| 1148.5518 | 1148.5477 | −.0041 | −4 | 125 | 133 | SGIECQLWR |
| 1148.5518 | 1148.5477 | −.0041 | −4 | 125 | 133 | SGIECQLWR |
| 1189.579 | 1189.5732 | −.0058 | −5 | 600 | 608 | YGFYTHVFR |
| 1194.6001 | 1194.5807 | −.0194 | −16 | 354 | 363 | ELLESYIDGR |
| 1194.6001 | 1194.5807 | −.0194 | −16 | 354 | 363 | ELLESYIDGR |
| 1265.6022 | 1265.592 | −.0102 | −8 | 453 | 461 | YNWRENLDR |
| 1489.7223 | 1489.7014 | −.0209 | −14 | 597 | 608 | DGKYGFYTHVFR |
| 1542.62 | 1542.6259 | .0059 | 4 | 561 | 575 | GDACEGDSGGP |
| | | | | | | FVMK |
| 1561.7281 | 1561.6975 | −.0306 | −20 | 315 | 327 | TATSEYQTFFNPR |
| 1561.7281 | 1561.6975 | −.0306 | −20 | 315 | 327 | TATSEYQTFFNPR |
| 1645.8214 | 1645.7874 | −.034 | −21 | 385 | 399 | SPQELLCGASLI |
| | | | | | | SDR |
| 1698.7211 | 1698.6948 | −.0263 | −15 | 560 | 575 | RGDACEGDSG |
| | | | | | | GPFVMK |
| 1773.9164 | 1773.8727 | −.0437 | −25 | 384 | 399 | KSPQELLCGASL |
| | | | | | | ISDR |
| 1883.8956 | 1883.8428 | −.0528 | −28 | 328 | 344 | TFGSGEADCGL |
| | | | | | | RPLFEK |
| 1883.8956 | 1883.8428 | −.0528 | −28 | 328 | 344 | TFGSGEADCGL |
| | | | | | | RPLFEK |
| 1963.908 | 1963.848 | −.06 | −31 | 248 | 263 | HQDFNSAVQLV |
| | | | | | | ENFCR |
| 1968.8903 | 1968.8427 | −.0476 | −24 | 100 | 117 | LAACLEGNCAE |
| | | | | | | GLGTNYR |
| 2001.9158 | 2001.8715 | −.0443 | −22 | 544 | 560 | ITDNMFCAGYKP |
| | | | | | | DEGKR |
| 2011.9906 | 2011.9392 | −.0514 | −26 | 328 | 345 | TFGSGEADCGL |
| | | | | | | RPLFEK K |
| 2017.9106 | 2017.8978 | −.0128 | −6 | 544 | 560 | ITDNMFCAGYKP |
| | | | | | | DEGKR |
| 2070.9761 | 2070.9165 | −.0596 | −29 | 199 | 217 | SEGSSVNLSPPL |
| | | | | | | EQCVP |
| | | | | | | DR |
| 2200.9275 | 2200.9404 | .0129 | 6 | 159 | 177 | NPDSSTMGPWC |
| | | | | | | YTTDPT |
| | | | | | | VR |
| 2212.0122 | 2212.0205 | .0083 | 4 | 98 | 117 | DKLAACLEGNCA |
| | | | | | | EGLGT |
| | | | | | | NYR |
| 2212.0122 | 2212.0205 | .0083 | 4 | 98 | 117 | DKLAACLEGNCA |
| | | | | | | EGLGT |
| | | | | | | NYR |
| 2232.2534 | 2232.1794 | −.074 | −33 | 518 | 537 | GQPSVLQVVNLP |
| | | | | | | IVERPV |
| | | | | | | CK |
| 2232.2534 | 2232.1794 | −.074 | −33 | 518 | 537 | GQPSVLQVVNLP |
| | | | | | | IVERPV |
| | | | | | | CK |
| 2281.0991 | 2281.072 | −.0271 | −12 | 364 | 383 | IVEGSDAEIGMS |
| | | | | | | PWQVM |
| | | | | | | LFR |
| 2292.0417 | 2292.0005 | −.0412 | −18 | 179 | 198 | QECSIPVCGQDQ |
| | | | | | | VTVAM |
| | | | | | | TPR |
| 2448.1428 | 2448.1128 | −.03 | −12 | 178 | 198 | RQECSIPVCGQD |
| | | | | | | QVTVA MTPR |
| 2888.3591 | 2888.29 | −.0691 | −24 | 199 | 224 | SEGSSVNLSPPL |
| | | | | | | EQCVP |
| | | | | | | DRGQQYQGR |
| 2888.3591 | 2888.29 | −.0691 | −24 | 199 | 224 | SEGSSVNLSPPL |
| | | | | | | EQCVP |
| | | | | | | DRGQQYQGR |

| | |
|---|---|
| unnamed protein product [Homo sapiens] | gi\|194383496 |

[0347] Peptide Information

| | Obsrv. | | | Start | End | |
|---|---|---|---|---|---|---|
| Calc. Mass | Mass | ±da | ±ppm | Seq. | Seq. | Sequence |
| 836.4009 | 836.415 | .0141 | 17 | 201 | 207 | GQQYQGR |
| 836.4009 | 836.415 | .0141 | 17 | 201 | 207 | GQQYQGR |
| 874.4781 | 874.4888 | .0107 | 12 | 484 | 491 | VTGWGNLK |
| 951.4894 | 951.5774 | .088 | 92 | 417 | 423 | YERNIEK |
| 971.425 | 971.4321 | .0071 | 7 | 70 | 77 | YTACETAR |
| 1148.5518 | 1148.5477 | −.0041 | −4 | 108 | 116 | SGIECQLWR |
| 1148.5518 | 1148.5477 | −.0041 | −4 | 108 | 116 | SGIECQLWR |
| 1189.579 | 1189.5732 | −.0058 | −5 | 583 | 591 | YGFYTHVFR |
| 1194.6001 | 1194.5807 | −.0194 | −16 | 337 | 346 | ELLESYIDGR |
| 1194.6001 | 1194.5807 | −.0194 | −16 | 337 | 346 | ELLESYIDGR |
| 1265.6022 | 1265.592 | −.0102 | −8 | 436 | 444 | YNWRENLDR |
| 1489.7223 | 1489.7014 | −.0209 | −14 | 580 | 591 | DGKYGFYTHVFR |
| 1542.62 | 1542.6259 | .0059 | 4 | 544 | 558 | GDACEGDSGGPFV |
| | | | | | | MK |
| 1561.7281 | 1561.6975 | −.0306 | −20 | 298 | 310 | TATSEYQTFFNPR |
| 1561.7281 | 1561.6975 | −.0306 | −20 | 298 | 310 | TATSEYQTFFNPR |
| 1645.8214 | 1645.7874 | −.034 | −21 | 368 | 382 | SPQELLCGASLISDR |
| 1698.7211 | 1698.6948 | −.0263 | −15 | 543 | 558 | RGDACEGDSGG |
| | | | | | | PFVMK |
| 1773.9164 | 1773.8727 | −.0437 | −25 | 367 | 382 | KSPQELLCGASL |
| | | | | | | ISDR |
| 1883.8956 | 1883.8428 | −.0528 | −28 | 311 | 327 | TFGSGEADCGL |
| | | | | | | RPLFEK |
| 1883.8956 | 1883.8428 | −.0528 | −28 | 311 | 327 | TFGSGEADCGL |
| | | | | | | RPLFEK |
| 1963.908 | 1963.848 | −.06 | −31 | 231 | 246 | HQDFNSAVQLV |
| | | | | | | ENFCR |
| 1968.8903 | 1968.8427 | −.0476 | −24 | 83 | 100 | LAACLEGNCAEG |
| | | | | | | LGTNYR |
| 2001.9158 | 2001.8715 | −.0443 | −22 | 527 | 543 | ITDNMFCAGYKP |
| | | | | | | DEGKR |
| 2011.9906 | 2011.9392 | −.0514 | −26 | 311 | 328 | TFGSGEADCGL |
| | | | | | | RPLFEKK |
| 2017.9106 | 2017.8978 | −.0128 | −6 | 527 | 543 | ITDNMFCAGYKP |
| | | | | | | DEGKR |
| 2070.9761 | 2070.9165 | −.0596 | −29 | 182 | 200 | SEGSSVNLSPPL |
| | | | | | | EQCVP |
| | | | | | | DR |
| 2212.0122 | 2212.0205 | .0083 | 4 | 81 | 100 | DKLAACLEGNCA |
| | | | | | | EGLGT |
| | | | | | | NYR |
| 2212.0122 | 2212.0205 | .0083 | 4 | 81 | 100 | DKLAACLEGNCA |
| | | | | | | EGLGT |
| | | | | | | NYR |
| 2232.2534 | 2232.1794 | −.074 | −33 | 501 | 520 | GQPSVLQVVNLP |
| | | | | | | IVERPV |
| | | | | | | CK |
| 2232.2534 | 2232.1794 | −.074 | −33 | 501 | 520 | GQPSVLQVVNLP |
| | | | | | | IVERPV CK |
| 2281.0991 | 2281.072 | −.0271 | −12 | 347 | 366 | IVEGSDAEIGMS |
| | | | | | | PWQVM |
| | | | | | | LFR |
| 2292.0417 | 2292.0005 | −.0412 | −18 | 162 | 181 | QECSIPVCGQD |
| | | | | | | QVTVAM |
| | | | | | | TPR |
| 2448.1428 | 2448.1128 | −.03 | −12 | 161 | 181 | RQECSIPVCGQD |
| | | | | | | QVTVA |
| | | | | | | MTPR |
| 2888.3591 | 2888.29 | −.0691 | −24 | 182 | 207 | SEGSSVNLSPPL |
| | | | | | | EQCVP |
| | | | | | | DRGQQYQGR |
| 2888.3591 | 2888.29 | −.0691 | −24 | 182 | 207 | SEGSSVNLSPPL |
| | | | | | | EQCVP |
| | | | | | | DRGQQYQGR |

| | |
|---|---|
| unnamed protein product [Homo sapiens] | gi\|1335344 |

[0348] Protein Group

| | |
|---|---|
| coagulation factor II (thrombin), isoform CRA_a | gi\|119588383 |
| [Homo sapiens] | |

[0349] Peptide Information

| | Obsrv. | | | Start | End | |
|---|---|---|---|---|---|---|
| Calc. Mass | Mass | ±da | ±ppm | Seq. | Seq. | Sequence |
| 836.4009 | 836.415 | .0141 | 17 | 211 | 217 | GQQYQGR |
| 836.4009 | 836.415 | .0141 | 17 | 211 | 217 | GQQYQGR |
| 874.4781 | 874.4888 | .0107 | 12 | 494 | 501 | VTGWGNLK |
| | 874.4888 | | | | | |
| 951.4894 | 951.5774 | .088 | 92 | 427 | 433 | YERNIEK |
| 971.425 | 971.4321 | .0071 | 7 | 80 | 87 | YTACETAR |
| 1148.5518 | 1148.5477 | −.0041 | −4 | 118 | 126 | SGIECQLWR |
| 1148.5518 | 1148.5477 | −.0041 | −4 | 118 | 126 | SGIECQLWR |
| 1189.579 | 1189.5732 | −.0058 | −5 | 593 | 601 | YGFYTHVFR |
| 1194.6001 | 1194.5807 | −.0194 | −16 | 347 | 356 | ELLESYIDGR |
| 1194.6001 | 1194.5807 | −.0194 | −16 | 347 | 356 | ELLESYIDGR |
| 1265.6022 | 1265.592 | −.0102 | −8 | 446 | 454 | YNWRENLDR |
| 1489.7223 | 1489.7014 | −.0209 | −14 | 590 | 601 | DGKYGFYTHVFR |
| 1542.62 | 1542.6259 | .0059 | 4 | 554 | 568 | GDACEGDSGGPFV |
| | | | | | | MK |
| 1561.7281 | 1561.6975 | −.0306 | −20 | 308 | 320 | TATSEYQTFFNPR |
| 1561.7281 | 1561.6975 | −.0306 | −20 | 308 | 320 | TATSEYQTFFNPR |
| 1645.8214 | 1645.7874 | −.034 | −21 | 378 | 392 | SPQELLCGASLISDR |
| 1698.7211 | 1698.6948 | −.0263 | −15 | 553 | 568 | RGDACEGDSGGPF |
| | | | | | | VMK |
| 1773.9164 | 1773.8727 | −.0437 | −25 | 377 | 392 | KSPQELLCGASLISDR |
| 1883.8956 | 1883.8428 | −.0528 | −28 | 321 | 337 | TFGSGEADCGLRPL |
| | | | | | | FEK |
| 1883.8956 | 1883.8428 | −.0528 | −28 | 321 | 337 | TFGSGEADCGLRPL |
| | | | | | | FEK |
| 1963.908 | 1963.848 | −.06 | −31 | 241 | 256 | HQDFNSAVQLVENF |
| | | | | | | CR |
| 1968.8903 | 1968.8427 | −.0476 | −24 | 93 | 110 | LAACLEGNCAEGLG |
| | | | | | | TNYR |
| 2001.9158 | 2001.8715 | −.0443 | −22 | 537 | 553 | ITDNMFCAGYKP |
| | | | | | | DEGKR |
| 2011.9906 | 2011.9392 | −.0514 | −26 | 321 | 338 | TFGSGEADCGL |
| | | | | | | RPLFEKK |
| 2017.9106 | 2017.8978 | −.0128 | −6 | 537 | 553 | ITDNMFCAGYKP |
| | | | | | | DEGKR |
| 2070.9761 | 2070.9165 | −.0596 | −29 | 192 | 210 | SEGSSVNLSPPL |
| | | | | | | EQCVP |
| | | | | | | DR |
| 2212.0122 | 2212.0205 | .0083 | 4 | 91 | 110 | DKLAACLEGNCA |
| | | | | | | EGLGT |
| | | | | | | NYR |
| 2212.0122 | 2212.0205 | .0083 | 4 | 91 | 110 | DKLAACLEGNCA |
| | | | | | | EGLGT |
| | | | | | | NYR |
| 2232.2534 | 2232.1794 | −.074 | −33 | 511 | 530 | GQPSVLQVVNLP |
| | | | | | | IVERPV |
| | | | | | | CK |
| 2232.2534 | 2232.1794 | −.074 | −33 | 511 | 530 | GQPSVLQVVNLP |
| | | | | | | IVERPV |
| | | | | | | CK |
| 2281.0991 | 2281.072 | −.0271 | −12 | 357 | 376 | IVEGSDAEIGMS |
| | | | | | | PWQVM |
| | | | | | | LFR |
| 2292.0417 | 2292.0005 | −.0412 | −18 | 172 | 191 | QECSIPVCGQD |
| | | | | | | QVTVAM |
| | | | | | | TPR |
| 2448.1428 | 2448.1128 | −.03 | −12 | 171 | 191 | RQECSIPVCGQD |
| | | | | | | QVTVA |
| | | | | | | MTPR |
| 2888.3591 | 2888.29 | −.0691 | −24 | 192 | 217 | SEGSSVNLSPPL |
| | | | | | | EQCVP |
| | | | | | | DRGQQYQGR |
| 2888.3591 | 2888.29 | −.0691 | −24 | 192 | 217 | SEGSSVNLSPPL |
| | | | | | | EQCVP |
| | | | | | | DRGQQYQGR |

| | |
|---|---|
| prothrombin preproprotein [Homo sapiens] | gi\|4503635 |

[0350] Protein Group

| | |
|---|---|
| Coagulation factor II (thrombin) [Homo sapiens] | gi\|30802115 |
| RecName: Full = Prothrombin; AltName: | gi\|135807 |
| Full = Coagulation factor II; Contains: | |
| RecName: Full = Activation peptide | |
| fragment 1; Contains: RecName: | |
| Full = Activation peptide fragment 2; | |
| Contains: RecName: Full = Thrombin | |
| light chain; | |
| Contains: RecName: Full = Thrombin | |
| heavy chain; Flags: | |
| Precursor | |
| coagulation factor II (thrombin) [Homo sapiens] | gi\|18653448 |
| coagulation factor II (thrombin), isoform CRA_c | gi\|119588385 |
| [Homo sapiens] | |
| coagulation factor II precursor variant [Homo sapiens] | gi\|62897113 |
| prothrombin [Homo sapiens] | gi\|339641 |
| prothrombin [Homo sapiens] | |
| prothrombin [Homo sapiens] | gi\|67624831 |
| unnamed protein product [Homo sapiens] | gi\|110623182 |

[0351] Peptide Information

| | Obsrv. | | | Start | End | |
|---|---|---|---|---|---|---|
| Calc. Mass | Mass | ±da | ±ppm | Seq. | Seq. | Sequence |
| 836.4009 | 836.415 | .0141 | 17 | 218 | 224 | GQQYQGR |
| 836.4009 | 836.415 | .0141 | 17 | 218 | 224 | GQQYQGR |
| 874.4781 | 874.4888 | .0107 | 12 | 501 | 508 | VTGWGNLK |
| 951.4894 | 951.5774 | .088 | 92 | 434 | 440 | YERNIEK |
| 971.425 | 971.4321 | .0071 | 7 | 87 | 94 | YTACETAR |
| 1148.5518 | 1148.5477 | −.0041 | −4 | 125 | 133 | SGIECQLWR |
| 1148.5518 | 1148.5477 | −.0041 | −4 | 125 | 133 | SGIECQLWR |
| 1189.579 | 1189.5732 | −.0058 | −5 | 600 | 608 | YGFYTHVFR |
| 1194.6001 | 1194.5807 | −.0194 | −16 | 354 | 363 | ELLESYIDGR |
| 1194.6001 | 1194.5807 | −.0194 | −16 | 354 | 363 | ELLESYIDGR |
| 1265.6022 | 1265.592 | −.0102 | −8 | 453 | 461 | YNWRENLDR |
| 1489.7223 | 1489.7014 | −.0209 | −14 | 597 | 608 | DGKYGFYTHVFR |
| 1542.62 | 1542.6259 | .0059 | 4 | 561 | 575 | GDACEGDSGGPFV |
| | | | | | | MK |
| 1561.7281 | 1561.6975 | −.0306 | −20 | 315 | 327 | TATSEYQTFFNPR |
| 1561.7281 | 1561.6975 | −.0306 | −20 | 315 | 327 | TATSEYQTFFNPR |
| 1645.8214 | 1645.7874 | −.034 | −21 | 385 | 399 | SPQELLCGASLISDR |
| 1698.7211 | 1698.6948 | −.0263 | −15 | 560 | 575 | RGDACEGDSGGPF |
| | | | | | | VMK |
| 1773.9164 | 1773.8727 | −.0437 | −25 | 384 | 399 | KSPQELLCGASL |
| | | | | | | ISDR |
| 1883.8956 | 1883.8428 | −.0528 | −28 | 328 | 344 | TFGSGEADCGL |
| | | | | | | RPLFEK |
| 1883.8956 | 1883.8428 | −.0528 | −28 | 328 | 344 | TFGSGEADCGL |
| | | | | | | RPLFEK |
| 1963.908 | 1963.848 | −.06 | −31 | 248 | 263 | HQDFNSAVQLV |
| | | | | | | ENFCR |
| 1968.8903 | 1968.8427 | −.0476 | −24 | 100 | 117 | LAACLEGNCAE |
| | | | | | | GLGTNYR |
| 2001.9158 | 2001.8715 | −.0443 | −22 | 544 | 560 | ITDNMFCAGYKP |
| | | | | | | DEGKR |
| 2011.9906 | 2011.9392 | −.0514 | −26 | 328 | 345 | TFGSGEADCGL |
| | | | | | | RPLFEKK |
| 2017.9106 | 2017.8978 | −.0128 | −6 | 544 | 560 | ITDNMFCAGYKP |
| | | | | | | DEGKR |
| 2070.9761 | 2070.9165 | −.0596 | −29 | 199 | 217 | SEGSSVNLSPPL |
| | | | | | | EQCVP |
| | | | | | | DR |
| 2212.0122 | 2212.0205 | .0083 | 4 | 98 | 117 | DKLAACLEGNCA |
| | | | | | | EGLGT |
| | | | | | | NYR |
| 2212.0122 | 2212.0205 | .0083 | 4 | 98 | 117 | DKLAACLEGNCA |
| | | | | | | EGLGT |
| | | | | | | NYR |
| 2232.2534 | 2232.1794 | −.074 | −33 | 518 | 537 | GQPSVLQVVNLP |
| | | | | | | IVERPV |
| | | | | | | CK |
| 2232.2534 | 2232.1794 | −.074 | −33 | 518 | 537 | GQPSVLQVVNLP |
| | | | | | | IVERPV |
| | | | | | | CK |
| 2281.0991 | 2281.072 | −.0271 | −12 | 364 | 383 | IVEGSDAEIGMS |
| | | | | | | PWQVM |
| | | | | | | LFR |
| 2292.0417 | 2292.0005 | −.0412 | −18 | 179 | 198 | QECSIPVCGQD |
| | | | | | | QVTVAM |
| | | | | | | TPR |
| 2448.1428 | 2448.1128 | −.03 | −12 | 178 | 198 | RQECSIPVCGQD |
| | | | | | | QVTVA |
| | | | | | | MTPR |
| 2888.3591 | 2888.29 | −.0691 | −24 | 199 | 224 | SEGSSVNLSPPL |
| | | | | | | EQCVP |
| | | | | | | DRGQQYQGR |
| 2888.3591 | 2888.29 | −.0691 | −24 | 199 | 224 | SEGSSVNLSPPL |
| | | | | | | EQCVP |
| | | | | | | DRGQQYQGR |

| | |
|---|---|
| coagulation factor II precursor variant | gi\|62897109 |
| [Homo sapiens] | |

[0352] Peptide Information

| | | | | Start | End | |
|---|---|---|---|---|---|---|
| Calc. Mass | Obsrv. Mass | ±da | ±ppm | Seq. | Seq. | Sequence |
| 836.4009 | 836.415 | .0141 | 17 | 218 | 224 | GQQYQGR |
| 836.4009 | 836.415 | .0141 | 17 | 218 | 224 | GQQYQGR |
| 874.4781 | 874.4888 | .0107 | 12 | 501 | 508 | VTGWGNLK |
| 951.4894 | 951.5774 | .088 | 92 | 434 | 440 | YERNIEK |
| 971.425 | 971.4321 | .0071 | 7 | 87 | 94 | YTACETAR |
| 1148.5518 | 1148.5477 | −.0041 | −4 | 125 | 133 | SGIECQLWR |
| 1148.5518 | 1148.5477 | −.0041 | −4 | 125 | 133 | SGIECQLWR |
| 1189.579 | 1189.5732 | −.0058 | −5 | 600 | 608 | YGFYTHVFR |
| 1194.6001 | 1194.5807 | −.0194 | −16 | 354 | 363 | ELLESYIDGR |
| 1194.6001 | 1194.5807 | −.0194 | −16 | 354 | 363 | ELLESYIDGR |
| 1265.6022 | 1265.592 | −.0102 | −8 | 453 | 461 | YNWRENLDR |
| 1489.7223 | 1489.7014 | −.0209 | −14 | 597 | 608 | DGKYGFYTHVFR |
| 1542.62 | 1542.6259 | .0059 | 4 | 561 | 575 | GDACEGDSGG |
| | | | | | | PFVMK |
| 1561.7281 | 1561.6975 | −.0306 | −20 | 315 | 327 | TATSEYQTFFN |
| | | | | | | PR |
| 1561.7281 | 1561.6975 | −.0306 | −20 | 315 | 327 | TATSEYQTFFN |
| | | | | | | PR |
| 1645.8214 | 1645.7874 | −.034 | −21 | 385 | 399 | SPQELLCGASLI |
| | | | | | | SDR |
| 1698.7211 | 1698.6948 | −.0263 | −15 | 560 | 575 | RGDACEGDSGG |
| | | | | | | PFVMK |
| 1773.9164 | 1773.8727 | −.0437 | −25 | 384 | 399 | KSPQELLCGASL |
| | | | | | | ISDR |
| 1963.908 | 1963.848 | −.06 | −31 | 248 | 263 | HQDFNSAVQLV |
| | | | | | | ENFCR |
| 1968.8903 | 1968.8427 | −.0476 | −24 | 100 | 117 | LAACLEGNCAEG |
| | | | | | | LGTNYR |
| 2001.9158 | 2001.8715 | −.0443 | −22 | 544 | 560 | ITDNMFCAGYKP |
| | | | | | | DEGKR |
| 2017.9106 | 2017.8978 | −.0128 | −6 | 544 | 560 | ITDNMFCAGYKP |
| | | | | | | DEGKR |
| 2070.9761 | 2070.9165 | −.0596 | −29 | 199 | 217 | SEGSSVNLSPPL |
| | | | | | | EQCVP |
| | | | | | | DR |
| 2212.0122 | 2212.0205 | .0083 | 4 | 98 | 117 | DKLAACLEGNCA |
| | | | | | | EGLGT |
| | | | | | | NYR |
| 2212.0122 | 2212.0205 | .0083 | 4 | 98 | 117 | DKLAACLEGNCA |
| | | | | | | EGLGT |
| | | | | | | NYR |
| 2232.2534 | 2232.1794 | −.074 | −33 | 518 | 537 | GQPSVLQVVNLP |
| | | | | | | IVERPV |
| | | | | | | CK |
| 2232.2534 | 1232.1794 | −.074 | −33 | 518 | 537 | GQPSVLQVVNLP |
| | | | | | | IVERPV |
| | | | | | | CK |
| 2281.0991 | 2281.072 | −.0271 | −12 | 364 | 383 | IVEGSDAEIGMS |
| | | | | | | PWQVM |
| | | | | | | LFR |
| 2292.0417 | 2292.0005 | −.0412 | −18 | 179 | 198 | QECSIPVCGQD |
| | | | | | | QVTVAM |
| | | | | | | TPR |
| 2448.1428 | 2448.1128 | −.03 | −12 | 178 | 198 | RQECSIPVCGQD |
| | | | | | | QVTVA |
| | | | | | | MTPR |
| 2888.3591 | 2888.29 | −.0691 | −24 | 199 | 224 | SEGSSVNLSPPL |
| | | | | | | EQCVP |
| | | | | | | DRGQQYQGR |
| 2888.3591 | 2888.29 | −.0691 | −24 | 199 | 224 | SEGSSVNLSPPL |
| | | | | | | EQCVP |
| | | | | | | DRGQQYQGR |

| | |
|---|---|
| coagulation factor II (thrombin), isoform CRA_b | gi\|119588384 |
| [Homo sapiens] | |

[0353] Peptide Information

| | Obsrv. | | | Start | End | |
|---|---|---|---|---|---|---|
| Calc. Mass | Mass | ±da | ±ppm | Seq. | Seq. | Sequence |
| 836.4009 | 836.415 | .0141 | 17 | 218 | 224 | GQQYQGR |
| 836.4009 | 836.415 | .0141 | 17 | 218 | 224 | GQQYQGR |
| 874.4781 | 874.4888 | .0107 | 12 | 501 | 508 | VTGWGNLK |
| 951.4894 | 951.5774 | .088 | 92 | 434 | 440 | YERNIEK |
| 971.425 | 971.4321 | .0071 | 7 | 87 | 94 | YTACETAR |
| 1148.5518 | 1148.5477 | −.0041 | −4 | 125 | 133 | SGIECQLWR |
| 1148.5518 | 1148.5477 | −.0041 | −4 | 125 | 133 | SGIECQLWR |
| 1194.6001 | 1194.5807 | −.0194 | −16 | 354 | 363 | ELLESYIDGR |
| | 1194.5807 | | | | | |
| 1194.6001 | 1194.5807 | −.0194 | −16 | 354 | 363 | ELLESYIDGR |
| 1265.6022 | 1265.592 | −.0102 | −8 | 453 | 461 | YNWRENLDR |
| 1561.7281 | 1561.6975 | −.0306 | −20 | 315 | 327 | TATSEYQTFFNPR |
| 1561.7281 | 1561.6975 | −.0306 | −20 | 315 | 327 | TATSEYQTFFNPR |
| 1645.8214 | 1645.7874 | −.034 | −21 | 385 | 399 | SPQELLCGASLI |
| | | | | | | SDR |
| 1773.9164 | 1773.8727 | −.0437 | −25 | 384 | 399 | KSPQELLCGASL |
| | | | | | | ISDR |
| 1883.8956 | 1883.8428 | −.0528 | −28 | 328 | 344 | TFGSGEADCGL |
| | | | | | | RPLFEK |
| 1883.8956 | 1883.8428 | −.0528 | −28 | 328 | 344 | TFGSGEADCGL |
| | | | | | | RPLFEK |
| 1963.908 | 1963.848 | −.06 | −31 | 248 | 263 | HQDFNSAVQLV |
| | | | | | | ENFCR |
| 1968.8903 | 1968.8427 | −.0476 | −24 | 100 | 117 | LAACLEGNCAEG |
| | | | | | | LGTNYR |
| 2011.9906 | 2011.9392 | −.0514 | −26 | 328 | 345 | TFGSGEADCGL |
| | | | | | | RPLFEKK |
| 2070.9761 | 2070.9165 | −.0596 | −29 | 199 | 217 | SEGSSVNLSPPL |
| | | | | | | EQCVP |
| | | | | | | DR |
| 2212.0122 | 2212.0205 | .0083 | 4 | 98 | 117 | DKLAACLEGNCA |
| | | | | | | EGLGT |
| | | | | | | NYR |
| 2212.0122 | 2212.0205 | .0083 | 4 | 98 | 117 | DKLAACLEGNCA |
| | | | | | | EGLGT |
| | | | | | | NYR |
| 2232.2534 | 2232.1794 | −.074 | −33 | 518 | 537 | GQPSVLQVVNLP |
| | | | | | | IVERPV |
| | | | | | | CK |
| 2232.2534 | 2232.1794 | −.074 | −33 | 518 | 537 | GQPSVLQVVNLP |
| | | | | | | IVERPV |
| | | | | | | CK |
| 2281.0991 | 2281.072 | −.0271 | −12 | 364 | 383 | IVEGSDAEIGMS |
| | | | | | | PWQVM |
| | | | | | | LFR |
| 2292.0417 | 2292.0005 | −.0412 | −18 | 179 | 198 | QECSIPVCGQD |
| | | | | | | QVTVAM |
| | | | | | | TPR |
| 2448.1428 | 2448.1128 | −.03 | −12 | 178 | 198 | RQECSIPVCGQD |
| | | | | | | QVTVA |
| | | | | | | MTPR |
| 2888.3591 | 2888.29 | −.0691 | −24 | 199 | 224 | SEGSSVNLSPPL |
| | | | | | | EQCVP |
| | | | | | | DRGQQYQGR |
| 2888.3591 | 2888.29 | −.0691 | −24 | 199 | 224 | SEGSSVNLSPPL |
| | | | | | | EQCVP |
| | | | | | | DRGQQYQGR |

| | |
|---|---|
| unnamed protein product [Homo sapiens] | gi\|194383358 |
| Full = PHD-like zinc finger protein | |
| unnamed protein product [Homo sapiens] | |
| unnamed protein product [Homo sapiens] | gi\|194382512 |

[0354] Peptide Information

| | Obsrv. | | | Start | End | |
|---|---|---|---|---|---|---|
| Calc. Mass | Mass | ±da | ±ppm | Seq. | Seq. | Sequence |
| 928.4193 | 928.4557 | .0364 | 39 | 314 | 320 | YIENMSR |

| | |
|---|---|
| zinc finger, CCHC domain | gi\|119582703 |
| containing 10, isoform | |
| CRA_d [Homo sapiens] | |

[0355] Protein Group

| | |
|---|---|
| RecName: Full = Zinc finger CCHC domain-containing | gi\|84028163 |
| protein 10 | |
| ZCCHC10 protein [Homo sapiens] | gi\|18490660 |
| Zinc finger, CCHC domain containing 10 [Homo | gi\|13528822 |
| sapiens] | |
| unnamed protein product [Homo sapiens] | gi\|194373877 |
| unnamed protein product [Homo sapiens] | gi\|193784674 |
| unnamed protein product [Homo sapiens] | gi\|7019971 |
| unnamed protein product [Homo sapiens] | gi\|40043232 |
| unnamed protein product [Homo sapiens] | gi\|40977976 |
| zinc finger CCHC domain-containing protein 10 [Homo | gi\|8923106 |
| sapiens] | |
| zinc finger, CCHC domain containing 10, isoform | gi\|119582700 |
| CRA_a [Homo sapiens] | |
| zinc finger, CCHC domain containing 10, isoform | gi\|119582701 |
| CRA_b [Homo sapiens] | |
| zinc finger, CCHC domain containing 10, isoform | gi\|119582702 |
| CRA_c [Homo sapiens] | |
| zinc finger, CCHC domain containing 10, isoform | gi\|119582704 |
| CRA_e [Homo sapiens] | |

[0356] Peptide Information

| | Obsrv. | | | Start | End | |
|---|---|---|---|---|---|---|
| Calc. Mass | Mass | ±da | ±ppm | Seq. | Seq. | Sequence |
| 928.5111 | 928.4557 | −.0554 | −60 | 64 | 70 | YLHRPSR |

| | |
|---|---|
| class E basic helix-loop-helix | gi\|13540521 |
| protein 41 [Homo sapiens] | |

[0357] Protein Group

| | |
|---|---|
| Basic helix-loop-helix family, member e41 [Homo | gi\|19684064 |
| sapiens] | |
| RecName: Full = Class E basic helix-loop-helix protein | gi\|20137459 |
| 41; Short = bHLHe41; AltName: Full = Class | |
| B basic helix-loop-helix protein 3; | |
| Short = bHLHb3; AltName: Full = Differentially | |
| expressed in chondrocytes protein 2; | |
| Short = hDEC2; AltName: Full = Enhancer-of-split and | |
| hairy-related protein 1; Short = SHARP-1 | |
| bHLH protein DEC2 [Homo sapiens] | gi\|12583669 |
| basic helix-loop-helix domain containing, class B, 3, | gi\|119616934 |
| isoform CRA_a [Homo sapiens] | |
| basic helix-loop-helix domain containing, class B, 3, | gi\|119616933 |
| isoform CRA_a [Homo sapiens] | |
| basic helix-loop-helix domain-containing [Homo | gi\|121647001 |
| sapiens] | |
| basic helix-loop-helix protein 3 isoform 1 [Homo | gi\|55669468 |
| sapiens] | |
| unnamed protein product [Homo sapiens] | gi\|221044670 |

[0358] Peptide Information

| | Obsrv. | | | Start | End | |
|---|---|---|---|---|---|---|
| Calc. Mass | Mass | ±da | ±ppm | Seq. | Seq. | Sequence |
| 1340.6263 | 1340.6824 | .0561 | 42 | 1 | 11 | MDEGIPHLQER |

| | |
|---|---|
| RecName: Full = Alkaline phosphatase, | gi\|68067533 |
| tissue-nonspecific isozyme; Short = | |
| AP-TNAP; Short = TNSALP; | |
| AltName: Full = Alkaline phosphatase | |
| liver/bone/kidney isozyme; | |
| Flags: Precursor | |

[0359] Protein Group

| | |
|---|---|
| Alkaline phosphatase, liver/bone/kidney [Homo sapiens] | gi\|187954299 |
| Alkaline phosphatase, liver/bone/kidney [Homo sapiens] | gi\|127801853 |
| Alkaline phosphatase, liver/bone/kidney [Homo sapiens] | gi\|127799935 |
| Alkaline phosphatase, liver/bone/kidney [Homo sapiens] | gi\|127799243 |
| Alkaline phosphatase, liver/bone/kidney [Homo sapiens] | gi\|118835602 |
| Alkaline phosphatase, liver/bone/kidney [Homo sapiens] | gi\|127796485 |
| alkalin phosphatase [Homo sapiens] | gi\|3401945 |
| alkaline phosphatase [Homo sapiens] | gi\|178462 |
| alkaline phosphatase, liver/bone/kidney [Homo sapiens] | gi\|55959694 |
| alkaline phosphatase, liver/bone/kidney [Homo sapiens] | gi\|55665927 |
| alkaline phosphatase, liver/bone/kidney, isoform | gi\|119615382 |
| CRA_a [Homo sapiens] | |
| alkaline phosphatase, liver/bone/kidney, isoform | gi\|119615381 |
| CRA_a [Homo sapiens] | |
| alkaline phosphatase, liver/bone/kidney, isoform | gi\|119615380 |
| CRA_a [Homo sapiens] | |
| alkaline phosphatase, liver/bone/kidney, isoform | gi\|119615383 |
| CRA_b [Homo sapiens] | |
| alkaline phosphatase, tissue-nonspecific isozyme | gi\|116734717 |
| isoform 1 precursor [Homo sapiens] | |
| alkaline phosphatase, tissue-nonspecific isozyme | gi\|294660770 |
| isoform 2 [Homo sapiens] | |
| alkaline phosphatase, tissue-nonspecific isozyme | gi\|294660772 |
| isoform 3 [Homo sapiens] | |
| unnamed protein product [Homo sapiens] | gi\|221040844 |
| unnamed protein product [Homo sapiens] | gi\|28738 |
| unnamed protein product [Homo sapiens] | gi\|221042090 |
| unnamed protein product [Homo sapiens] | gi\|189069211 |
| unnamed protein product [Homo sapiens] | gi\|221039408 |

[0360] Peptide Information

| | Obsrv. | | | | | |
|---|---|---|---|---|---|---|
| Calc. Mass | Mass | ±da | ±ppm | Start Seq. | End Seq. | Sequence |
| 1835.9028 | 1835.9573 | .0545 | 30 | 137 | 152 | SRCNTTQGNEV |
| | | | | | | TSILR |

| | |
|---|---|
| eukaryotic translation initiation factor 3 | gi\|312433975 |
| subunit C [Homo sapiens] | |

[0361] Protein Group

| | |
|---|---|
| EIF3CL protein [Homo sapiens] | gi\|187956832 |
| Eukaryotic translation initiation factor 3, subunit C | gi\|187957270 |
| [Homo sapiens] | |
| Eukaryotic translation initiation factor 3, subunit C | gi\|16306765 |
| [Homo sapiens] | |
| Eukaryotic translation initiation factor 3, subunit C | gi\|47939099 |
| [Homo sapiens] | |
| RecName: Full = Eukaryotic translation initiation | gi\|6685539 |
| factor 3 subunit C; Short = eIF3c; AltName: | |
| Full = Eukaryotic translation initiation factor 3 | |
| subunit 8; AltName: Full = eIF3 p110 | |
| Translation initiation factor eIF-p110 [Homo sapiens] | gi\|3337383 |
| cell migration-inducing protein 17 [Homo sapiens] | gi\|59803473 |
| eIF-3 p110 subunit [Homo sapiens] | gi\|1931584 |
| eukaryotic translation initiation factor 3 subunit C [Homo | gi\|153791492 |
| sapiens] | |
| eukaryotic translation initiation factor 3 subunit C [Homo | gi\|83700233 |
| sapiens] | |
| eukaryotic translation initiation factor 3 subunit C [Homo | gi\|4503525 |
| sapiens] | |
| eukaryotic translation initiation factor 3, subunit 8, | gi\|119570881 |
| 110 kDa, isoform CRA_a [Homo sapiens] | |
| eukaryotic translation initiation factor 3, subunit 8, | gi\|119570877 |
| 110 kDa, isoform CRA_a [Homo sapiens] | |
| eukaryotic translation initiation factor 3, subunit 8, | gi\|119570879 |
| 110 kDa, isoform CRA_a [Homo sapiens] | |
| eukaryotic translation initiation factor 3, subunit 8, | gi\|119570880 |
| 110 kDa, isoform CRA_b [Homo sapiens] | |
| eukaryotic translation initiation factor 3, subunit 8, | gi\|119570878 |
| 110 kDa, isoform CRA_b [Homo sapiens] | |
| translation intiation factor eIF-3 p110 subunit [Homo | gi\|1718197 |
| sapiens] | |
| unnamed protein product [Homo sapiens] | gi\|194385866 |
| unnamed protein product [Homo sapiens] | gi\|194383552 |
| unnamed protein product [Homo sapiens] | gi\|194376092 |
| unnamed protein product [Homo sapiens] | gi\|194375309 |
| unnamed protein product [Homo sapiens] | gi\|194373399 |
| unnamed protein product [Homo sapiens] | gi\|7021015 |
| unnamed protein product [Homo sapiens] | gi\|158257742 |
| unnamed protein product [Homo sapiens] | gi\|194387978 |
| unnamed protein product [Homo sapiens] | gi\|193786223 |

[0362] Peptide Information

| Calc. | Obsrv. | | | Start | End | |
|---|---|---|---|---|---|---|
| Mass | Mass | ±da | ±ppm | Seq. | Seq. | Sequence |
| 928.4886 | 928.4557 | −.0329 | −35 | 554 | 560 | YIYAKDR |

| | |
|---|---|
| BarH-like homeobox 1 [Homo sapiens] | gi\|219521562 |

[0363] Peptide Information

| | Obsrv. | | | Start | End | |
|---|---|---|---|---|---|---|
| Calc. Mass | Mass | ±da | ±ppm | Seq. | Seq. | Sequence |
| 928.4886 | 928.4557 | −.0329 | −35 | 202 | 208 | YLSVQYR |

| | |
|---|---|
| eukaryotic translation initiation | gi\|119598673 |
| factor 4 gamma, 1, | |
| isoform CRA_g [Homo sapiens] | |

[0364] Protein Group

| | |
|---|---|
| EIF4G1 protein [Homo sapiens] | gi\|187956781 |
| EIF4G1 protein [Homo sapiens] | gi\|187954575 |
| EIF4G1 protein [Homo sapiens] | gi\|14043628 |
| EIF4G1 variant protein [Homo sapiens] | gi\|68533081 |
| RecName: Full = Eukaryotic translation initiation | gi\|294862538 |
| factor 4 gamma 1; Short = eIF-4-gamma 1; | |
| Short = eIF-4G 1; Short = eIF-4G1; AltName: | |
| Full = p220 | |
| eukaryotic protein synthesis initiation factor [Homo | gi\|3941724 |
| sapiens] | |
| eukaryotic translation initiation factor 4 gamma 1 | gi\|302699237 |
| isoform 1 [Homo sapiens] | |
| eukaryotic translation initiation factor 4 gamma 1 | gi\|38201627 |
| isoform 2 [Homo sapiens] | |
| eukaryotic translation initiation factor 4 gamma 1 | gi\|38201625 |
| isoform 3 [Homo sapiens] | |
| eukaryotic translation initiation factor 4 gamma 1 | gi\|302699239 |
| isoform 4 [Homo sapiens] | |
| eukaryotic translation initiation factor 4 gamma 1 | gi\|38201623 |
| isoform 5 [Homo sapiens] | |
| eukaryotic translation initiation factor 4 gamma 1 | gi\|302699247 |
| isoform 6 [Homo sapiens] | |
| eukaryotic translation initiation factor 4 gamma 1 | gi\|302699245 |
| isoform 6 [Homo sapiens] | |
| eukaryotic translation initiation factor 4 gamma, 1 | gi\|30583403 |
| [Homo sapiens] | |
| eukaryotic translation initiation factor 4 gamma, 1, | gi\|119598663 |
| isoform CRA_a [Homo sapiens] | |
| eukaryotic translation initiation factor 4 gamma, 1, | gi\|119598672 |
| isoform CRA_c [Homo sapiens] | |
| eukaryotic translation initiation factor 4 gamma, 1, | gi\|119598669 |
| isoform CRA_c [Homo sapiens] | |
| eukaryotic translation initiation factor 4 gamma, 1, | gi\|119598665 |
| isoform CRA_c [Homo sapiens] | |
| eukaryotic translation initiation factor 4 gamma, 1, | gi\|119598666 |
| isoform CRA_d [Homo sapiens] | |
| eukaryotic translation initiation factor 4 gamma, 1, | gi\|119598667 |
| isoform CRA_e [Homo sapiens] | |
| eukaryotic translation initiation factor 4 gamma, 1, | gi\|119598671 |
| isoform CRA_f [Homo sapiens] | |
| eukaryotic translation initiation factor 4 gamma, 1, | gi\|119598668 |
| isoform CRA_f [Homo sapiens] | |
| eukaryotic translation initiation factor 4 gamma, 1, | gi\|119598670 |
| isoform CRA_g [Homo sapiens] | |
| eukaryotic translation initiation factor 4 gamma, 1, | gi\|119598674 |
| isoform CRA_h [Homo sapiens] | |
| eukaryotic translation initiation factor 4G I [Homo | gi\|21634449 |
| sapiens] | |
| eukaryotic translation initiation factor 4GI [Homo | gi\|21655146 |
| sapiens] | |
| hypothetical protein [Homo sapiens] | gi\|57997536 |
| unnamed protein product [Homo sapiens] | gi\|194389380 |
| unnamed protein product [Homo sapiens] | |

[0365] Peptide Information

| | | | | Start | | |
|---|---|---|---|---|---|---|
| Calc. Mass | Obsrv. Mass | ±da | ±ppm | Seq. | End Seq. | Sequence |
| 1340.7355 | 1340.6824 | −.0531 | −40 | 929 | 939 | EHIKVQQLMAK |

| | |
|---|---|
| exocyst complex component 6, isoform CRA_d | gi\|119570470 |
| [Homo sapiens] | |

[0366] Protein Group

| | |
|---|---|
| Exocyst complex component 6 [Homo sapiens] | gi\|34783239 |
| RecName: Full = Exocyst complex component 6; | gi\|212287926 |
| AltName: Full = Exocyst complex component | |
| Sec15A; AltName: Full = SEC15-like protein 1 | |
| SEC15-like protein 3 [Homo sapiens] | gi\|148608033 |
| exocyst complex component 6 [Homo sapiens] | gi\|123231220 |
| exocyst complex component 6 [Homo sapiens] | gi\|55665929 |
| exocyst complex component 6 [Homo sapiens] | gi\|123227366 |
| exocyst complex component 6 isoform a [Homo | gi\|65507403 |
| sapiens] | |
| exocyst complex component 6 isoform b [Homo | gi\|62243652 |
| sapiens] | |
| exocyst complex component 6, isoform CRA_a [Homo | gi\|119570467 |
| sapiens] | |
| exocyst complex component 6, isoform CRA_b [Homo | gi\|119570468 |
| sapiens] | |
| exocyst complex component 6, isoform CRA_c [Homo | gi\|119570469 |
| sapiens] | |
| exocyst complex component 6, isoform CRA_e [Homo | gi\|119570471 |
| sapiens] | |
| hypothetical protein [Homo sapiens] | gi\|6807998 |
| unnamed protein product [Homo sapiens] | gi\|221043148 |
| unnamed protein product [Homo sapiens] | gi\|194375816 |
| unnamed protein product [Homo sapiens] | gi\|40032933 |
| unnamed protein product [Homo sapiens] | gi\|108250166 |
| unnamed protein product [Homo sapiens] | gi\|193785860 |
| unnamed protein product [Homo sapiens] | gi\|189054938 |
| unnamed protein product [Homo sapiens] | gi\|7023795 |
| unnamed protein product [Homo sapiens] | |

[0367] Peptide Information

| | Obsrv. | | | Start | End | |
|---|---|---|---|---|---|---|
| Calc. Mass | Mass | ±da | ±ppm | Seq. | Seq. | Sequence |
| 928.5138 | 928.4557 | −.0581 | −63 | 583 | 590 | LYGLSTFK |

| | |
|---|---|
| RecName: Full = Protein FAM183B | gi\|215275260 |

[0368] Protein Group

| | |
|---|---|
| hCG1645872 [Homo sapiens] | gi\|119614518 |
| hypothetical gene supported by BC045803 [Homo | gi\|51094744 |
| sapiens] | |
| testis highly expressed protein 6 [Homo sapiens] | gi\|225734648 |
| unnamed protein product [Homo sapiens] | gi\|261385756 |
| unnamed protein product [Homo sapiens] | gi\|40046854 |

[0369] Peptide Information

| | Obsrv. | | | Start | End | |
|---|---|---|---|---|---|---|
| Calc. Mass | Mass | ±da | ±ppm | Seq. | Seq. | Sequence |
| 1835.9723 | 1835.9573 | −.015 | −8 | 7 | 21 | ERVVTDEVHQNQILR |

| | |
|---|---|
| SWI/SNF related, matrix associated, actin | gi\|119579218 |
| dependent regulator of chromatin, subfamily | |
| a, member 2, isoform | |
| CRA_a [Homo sapiens] | |
| HBRM [Homo sapiens] | gi\|414117 |

[0370] Protein Group

| | |
|---|---|
| RecName: Full = Probable global transcription activator | gi\|212276472 |
| SNF2L2; AltName: Full = ATP-dependent helicase | |
| SMARCA2; AltName: Full = BRG1-associated factor | |
| 190B; Short = BAF190B; AltName: | |
| Full = Protein brahma homolog; | |
| Short = hBRM; AltName: Full = SNF2-alpha; | |
| AltName: Full = SWI/SNF-related matrix- | |
| associated actin-dependent regulator of | |
| chromatin subfamily A | |
| member 2 | |
| SWI/SNF related, matrix associated, actin dependent | gi\|55957478 |
| regulator of chromatin, subfamily a, member 2 [Homo | |
| sapiens] | |
| SWI/SNF related, matrix associated, actin dependent | gi\|55958984 |
| regulator of chromatin, subfamily a, member 2 [Homo | |
| sapiens] | |
| SWI/SNF related, matrix associated, actin dependent | gi\|55958983 |
| regulator of chromatin, subfamily a, member 2 [Homo | |
| sapiens] | |
| SWI/SNF related, matrix associated, actin dependent | gi\|55957477 |
| regulator of chromatin, subfamily a, member 2 [Homo | |
| sapiens] | |
| SWI/SNF related, matrix associated, actin dependent | gi\|55958982 |
| regulator of chromatin, subfamily a, | |
| member 2 [Homo sapiens] | |
| regulator of chromatin, subfamily a, | |
| CRA a [Homo sapiens] | |
| SWI/SNF related, matrix associated, | gi\|119579 |
| regulator of chromatin, subfamily a, | |
| CRA c [Homo sapiens] | |
| SWI/SNF related, matrix associated, | gi\|119579 |
| regulator of chromatin, subfamily a, | |
| CRA c [Homo sapiens] | |
| probable global transcription activator | gi\|482559 |
| a [Homo sapiens] | |
| b [Homo sapiens] | |

| | | | | Start | | |
|---|---|---|---|---|---|---|
| Calc. Mass | Obsrv. Mass | ±da | ±ppm | Seq. | End Seq. | Sequence |
| 1405.7039 | 1405.7631 | .0592 | 42 | 391 | 401 | QLRQEVVACMR |

| | |
|---|---|
| C protein [Homo sapiens] | gi\|36501 |

[0371] Peptide Information

| | Obsrv. | | | Start | End | |
|---|---|---|---|---|---|---|
| Calc. Mass | Mass | ±da | ±ppm | Seq. | Seq. | Sequence |
| 949.4924 | 949.515 | .0226 | 24 | 972 | 978 | KSMEWLR |

[0372] Protein Group

| | |
|---|---|
| transducin-like enhancer of split 4 | gi\|55959926 |
| (E(sp1) homolog, | |
| Drosophila) [Homo sapiens] | |
| transducin-like enhancer of split 4 | gi\|55958795 |
| (E(sp1) homolog, | |
| Drosophila) [Homo sapiens] | |
| transducin-like enhancer of split 4 | gi\|57208918 |
| (E(sp1) homolog, | |
| Drosophila) [Homo sapiens] | |

[0373] Peptide Information

| | Obsrv. | | | Start | End | |
|---|---|---|---|---|---|---|
| Calc. Mass | Mass | ±da | ±ppm | Seq. | Seq. | Sequence |
| 850.4417 | 850.405 | −.0367 | −43 | 198 | 205 | VSPSASFR |

| | |
|---|---|
| leucine rich repeat containing 27, | gi\|119569507 |
| isoform CRA_b | |
| [Homo sapiens] | |

[0374] Protein Group

| | |
|---|---|
| KIAA1674 protein [Homo sapiens] | gi\|12697893 |
| RecName: Full = Leucine-rich repeat-containing protein | gi\|85701139 |
| 27 | |
| leucine rich repeat containing 27, isoform CRA_a | gi\|119569506 |
| [Homo sapiens] | |
| leucine rich repeat containing 27, isoform CRA_a | gi\|119569508 |
| [Homo sapiens] | |
| leucine-rich repeat-containing protein 27 isoform a | gi\|219555700 |
| [Homo sapiens] | |
| leucine-rich repeat-containing protein 27 isoform a | gi\|55741567 |
| [Homo sapiens] | |
| novel protein [Homo sapiens] | gi\|55960576 |
| novel protein [Homo sapiens] | gi\|55960574 |
| novel protein [Homo sapiens] | |
| unnamed protein product [Homo sapiens] | gi\|194376382 |
| unnamed protein product [Homo sapiens] | gi\|193783556 |
| unnamed protein product [Homo sapiens] | gi\|21752065 |

[0375] Peptide Information

| | Obsrv. | | | | | |
|---|---|---|---|---|---|---|
| Calc. Mass | Mass | ±da | ±ppm | Start Seq. | End Seq. | Sequence |
| 1340.6852 | 1340.6824 | −.0028 | −2 | 381 | 390 | QHVLQMREQR |

### 3—Prothrombin Complex Concentrate

[0376] Below is the sequence of the 8 new found proteins which will be named KH11, KH12, KH13, KH14, KH15, KH16, KH17 and KH18 and its functions are under investigation.

| | | | |
|---|---|---|---|
| | 60/C9 | | Instr./Gel Origin |
| | [1] Sample Project | | Instrument |
| | 20110503 | | Sample |
| | | | Name |
| Protein | | | |
| Name- | KH11 (SEQ ID NO. KH11) | Accession No. | |

| | |
|---|---|
| unnamed protein product | gi\|215415638 |
| [Homo sapiens] | |

[0377] Peptide Information

| | | | | Start | End | |
|---|---|---|---|---|---|---|
| Calc. Mass | Obsrv. Mass | ±da | ±ppm | Seq. | Seq. | Sequence |
| 831.4359 | 831.4695 | .0336 | 40 | 189 | 195 | LAEYHAK |
| 869.5203 | 869.5491 | .0288 | 33 | 117 | 123 | QKVEPLR |
| 873.4424 | 873.4709 | .0285 | 33 | 124 | 131 | AELQEGAR |
| 1008.5697 | 1008.5928 | .0231 | 23 | 152 | 160 | ARAHVDALR |
| 1012.5786 | 1012.6014 | .0228 | 23 | 207 | 215 | AKPALEDLR |
| 1012.5786 | 1012.6014 | .0228 | 23 | 207 | 215 | AKPALEDLR |
| 1226.5437 | 1226.5634 | .0197 | 16 | 1 | 10 | DEPPQSPWDR |
| 1226.5437 | 1226.5634 | .0197 | 16 | 1 | 10 | DEPPQSPWDR |
| 1252.6208 | 1252.6487 | .0279 | 22 | 97 | 106 | VQPYLDDFQK |
| 1283.5725 | 1283.6271 | .0546 | 43 | 108 | 116 | WQEEMELYR |
| 1301.6484 | 1301.66 | .0116 | 9 | 161 | 171 | THLAPYSDELR |
| 1301.6484 | 1301.66 | .0116 | 9 | 161 | 171 | THLAPYSDELR |
| 1311.5555 | 1311.5947 | .0392 | 30 | 78 | 88 | ETEGLCQEMSK |
| 1318.642 | 1318.6689 | .0269 | 20 | 141 | 151 | LSPLGEEMRDR |
| 1327.5505 | 1327.6265 | .076 | 57 | 78 | 88 | ETEGLCQEMSK |
| 1380.7158 | 1380.7303 | .0145 | 11 | 97 | 107 | VQPYLDDFQKK |
| 1386.7152 | 1386.7365 | .0213 | 15 | 227 | 238 | VSFLSALEEYTK |
| 1400.6693 | 1400.715 | .0457 | 33 | 28 | 40 | DYVSQFEGSALGK |
| 1411.6675 | 1411.6667 | −.0008 | −1 | 107 | 116 | KWQEEMELYR |
| 1453.707 | 1453.7174 | .0104 | 7 | 1 | 12 | DEPPQSPWDRVK |
| 1467.7914 | 1467.7849 | −.0065 | −4 | 119 | 131 | VEPLRAELQEGAR |
| 1467.7914 | 1467.7849 | −.0065 | −4 | 119 | 131 | VEPLRAELQEGAR |
| 1585.8081 | 1585.8174 | .0093 | 6 | 161 | 173 | THLAPYSDELRQR |
| 1585.8081 | 1585.8174 | .0093 | 6 | 161 | 173 | THLAPYSDELRQR |
| 1612.7854 | 1612.8048 | .0194 | 12 | 46 | 59 | LLDNWDSVTSTF |
| | | | | | | SK |
| 1650.8698 | 1650.8733 | .0035 | 2 | 13 | 27 | DLATVYVDVLKD |
| | | | | | | SGR |
| 1815.8508 | 1815.8446 | −.0062 | −3 | 24 | 40 | DSGRDYVSQFE |
| | | | | | | GSALGK |
| 1815.8508 | 1815.8446 | −.0062 | −3 | 24 | 40 | DSGRDYVSQF |
| | | | | | | EGSALGK |
| 2202.1189 | 2202.0879 | −.031 | −14 | 60 | 77 | LREQLGPVTQEFWDNLEK |

| | |
|---|---|
| Chain A, Solution Structure Of Double Super Helix | gi\|293651900 |
| Model | |

[0378] Protein Group

| | |
|---|---|
| Chain A, Crystal Structure Of Lipid-Free Human | gi\|90108664 |
| Apolipoprotein A-I | |
| Chain B, Crystal Structure Of Lipid-Free Human | gi\|90108665 |
| Apolipoprotein A-I | |
| Chain B, Solution Structure Of Double Super Helix | gi\|293651901 |
| Model | |
| Chain C, Crystal Structure Of Lipid-Free Human | gi\|90108666 |
| Apolipoprotein A-I | |
| apoA1 [Homo sapiens] | gi\|490098 |
| apoAI [Homo sapiens] | gi\|1330306 |
| unnamed protein product [Homo sapiens] | gi\|215415678 |

[0379] Peptide Information

| | | | | | End | |
|---|---|---|---|---|---|---|
| Calc. Mass | Obsrv. Mass | ±da | ±ppm | Start Seq. | Seq. | Sequence |
| 831.4359 | 831.4695 | .0336 | 40 | 189 | 195 | LAEYHAK |
| 869.5203 | 869.5491 | .0288 | 33 | 117 | 123 | QKVEPLR |
| 873.4424 | 873.4709 | .0285 | 33 | 124 | 131 | AELQEGAR |
| 1008.5697 | 1008.5928 | .0231 | 23 | 152 | 160 | ARAHVDALR |
| 1012.5786 | 1012.6014 | .0228 | 23 | 207 | 215 | AKPALEDLR |
| 1012.5786 | 1012.6014 | .0228 | 23 | 207 | 215 | AKPALEDLR |
| 1226.5437 | 1226.5634 | .0197 | 16 | 1 | 10 | DEPPQSPWDR |
| 1226.5437 | 1226.5634 | .0197 | 16 | 1 | 10 | DEPPQSPWDR |
| 1252.6208 | 1252.6487 | .0279 | 22 | 97 | 106 | VQPYLDDFQK |
| 1283.5725 | 1283.6271 | .0546 | 43 | 108 | 116 | WQEEMELYR |
| 1301.6484 | 1301.66 | .0116 | 9 | 161 | 171 | THLAPYSDELR |
| 1301.6484 | 1301.66 | .0116 | 9 | 161 | 171 | THLAPYSDELR |
| 1318.642 | 1318.6689 | .0269 | 20 | 141 | 151 | LSPLGEEMRDR |
| 1323.621 | 1323.6156 | −.0054 | −4 | 78 | 88 | ETEGLRQEMSK |
| 1380.7158 | 1380.7303 | .0145 | 11 | 97 | 107 | VQPYLDDF |
| | | | | | | QKK |
| 1386.7152 | 1386.7365 | .0213 | 15 | 227 | 238 | VSFLSALEE |
| | | | | | | YTK |
| 1400.6693 | 1400.715 | .0457 | 33 | 28 | 40 | DYVSQFEG |
| | | | | | | SALGK |
| 1411.6675 | 1411.6667 | −.0008 | −1 | 107 | 116 | KWQEEMEL |
| | | | | | | YR |
| 1453.707 | 1453.7174 | .0104 | 7 | 1 | 12 | DEPPQSPW |
| | | | | | | DRVK |
| 1467.7914 | 1467.7849 | −.0065 | −4 | 119 | 131 | VEPLRAELQEG |
| | | | | | | AR |
| 1467.7914 | 1467.7849 | −.0065 | −4 | 119 | 131 | VEPLRAELQEG |
| | | | | | | AR |
| 1585.8081 | 1585.8174 | .0093 | 6 | 161 | 173 | THLAPYSDELR |
| | | | | | | QR |
| 1585.8081 | 1585.8174 | .0093 | 6 | 161 | 173 | THLAPYSDELR |
| | | | | | | QR |
| 1612.7854 | 1612.8048 | .0194 | 12 | 46 | 59 | LLDNWDSVTST |
| | | | | | | FSK |
| 1650.8698 | 1650.8733 | .0035 | 2 | 13 | 27 | DLATVYVDVLK |
| | | | | | | DSGR |
| 1815.8508 | 1815.8446 | −.0062 | −3 | 24 | 40 | DSGRDYVSQF |
| | | | | | | EGSALGK |
| 1815.8508 | 1815.8446 | −.0062 | −3 | 24 | 40 | DSGRDYVSQF |
| | | | | | | EGSALGK |
| 2202.1189 | 2202.0879 | −.031 | −14 | 60 | 77 | LREQLGPVTQE |
| | | | | | | FWDNLEK |

| | |
|---|---|
| unnamed protein product [Homo sapiens] | gi\|215415636 |

[0380] Peptide Information

| | Obsrv. | | | | End | |
|---|---|---|---|---|---|---|
| Calc. Mass | Mass | ±da | ±ppm | Start Seq. | Seq. | Sequence |
| 831.4359 | 831.4695 | .0336 | 40 | 189 | 195 | LAEYHAK |
| 869.5203 | 869.5491 | .0288 | 33 | 117 | 123 | QKVEPLR |
| 873.4424 | 873.4709 | .0285 | 33 | 124 | 131 | AELQEGAR |
| 1008.5697 | 1008.5928 | .0231 | 23 | 152 | 160 | ARAHVDALR |
| 1012.5786 | 1012.6014 | .0228 | 23 | 207 | 215 | AKPALEDLR |
| 1012.5786 | 1012.6014 | .0228 | 23 | 207 | 215 | AKPALEDLR |
| 1226.5437 | 1226.5634 | .0197 | 16 | 1 | 10 | DEPPQSPWDR |
| 1226.5437 | 1226.5634 | .0197 | 16 | 1 | 10 | DEPPQSPWDR |
| 1252.6208 | 1252.6487 | .0279 | 22 | 97 | 106 | VQPYLDDFQK |
| 1283.5725 | 1283.6271 | .0546 | 43 | 108 | 116 | WQEEMELYR |
| 1301.6484 | 1301.66 | .0116 | 9 | 161 | 171 | THLAPYSDELR |
| 1301.6484 | 1301.66 | .0116 | 9 | 161 | 171 | THLAPYSDELR |
| 1318.642 | 1318.6689 | .0269 | 20 | 141 | 151 | LSPLGEEMRDR |
| 1323.621 | 1323.6156 | −.0054 | −4 | 78 | 88 | ETEGLRQEMSK |
| 1380.7158 | 1380.7303 | .0145 | 11 | 97 | 107 | VQPYLDDFQKK |
| 1386.7152 | 1386.7365 | .0213 | 15 | 227 | 238 | VSFLSALEEYTK |
| 1400.6693 | 1400.715 | .0457 | 33 | 28 | 40 | DYVSQFEGSALGK |
| 1411.6675 | 1411.6667 | −.0008 | −1 | 107 | 116 | KWQEEMELYR |
| 1453.707 | 1453.7174 | .0104 | 7 | 1 | 12 | DEPPQSPWDRVK |
| 1467.7914 | 1467.7849 | −.0065 | −4 | 119 | 131 | VEPLRAELQEGAR |
| 1467.7914 | 1467.7849 | −.0065 | −4 | 119 | 131 | VEPLRAELQEGAR |
| 1585.8081 | 1585.8174 | .0093 | 6 | 161 | 173 | THLAPYSDELRQR |
| 1585.8081 | 1585.8174 | .0093 | 6 | 161 | 173 | THLAPYSDELRQR |
| | 1585.8174 | | | | | |
| 1612.7854 | 1612.8048 | .0194 | 12 | 46 | 59 | LLDNWDSVTST |
| | | | | | | FSK |
| 1650.8698 | 1650.8733 | .0035 | 2 | 13 | 27 | DLATVYVDVLK |
| | | | | | | DSGR |
| 1815.8508 | 1815.8446 | −.0062 | −3 | 24 | 40 | DSGRDYVSQF |
| | | | | | | EGSALGK |
| 1815.8508 | 1815.8446 | −.0062 | −3 | 24 | 40 | DSGRDYVSQF |
| | | | | | | EGSALGK |

| | |
|---|---|
| unnamed protein product [Homo sapiens] | gi\|215415652 |

[0381] Peptide Information

| | Obsrv. | | | | End | |
|---|---|---|---|---|---|---|
| Calc. Mass | Mass | ±da | ±ppm | Start Seq. | Seq. | Sequence |
| 831.4359 | 831.4695 | .0336 | 40 | 189 | 195 | LAEYHAK |
| 869.5203 | 869.5491 | .0288 | 33 | 117 | 123 | QKVEPLR |
| 873.4424 | 873.4709 | .0285 | 33 | 124 | 131 | AELQEGAR |
| 1012.5786 | 1012.6014 | .0228 | 23 | 207 | 215 | AKPALEDLR |
| 1012.5786 | 1012.6014 | .0228 | 23 | 207 | 215 | AKPALEDLR |
| 1226.5437 | 1226.5634 | .0197 | 16 | 1 | 10 | DEPPQSPWDR |
| 1226.5437 | 1226.5634 | .0197 | 16 | 1 | 10 | DEPPQSPWDR |
| 1252.6208 | 1252.6487 | .0279 | 22 | 97 | 106 | VQPYLDDFQK |
| 1283.6273 | 1283.6271 | −.0002 | 0 | 150 | 160 | DCARAHVDALR |
| 1301.6484 | 1301.66 | .0116 | 9 | 161 | 171 | THLAPYSDELR |
| 1301.6484 | 1301.66 | .0116 | 9 | 161 | 171 | THLAPYSDELR |
| 1311.5555 | 1311.5947 | .0392 | 30 | 78 | 88 | ETEGLCQEMSK |
| 1327.5505 | 1327.6265 | .076 | 57 | 78 | 88 | ETEGLCQEMSK |
| 1380.7158 | 1380.7303 | .0145 | 11 | 97 | 107 | VQPYLDDFQKK |
| 1386.7152 | 1386.7365 | .0213 | 15 | 227 | 238 | VSFLSALEEYTK |
| 1400.6693 | 1400.715 | .0457 | 33 | 28 | 40 | DYVSQFEGSALGK |
| 1411.6675 | 1411.6667 | −.0008 | −1 | 107 | 116 | KWQEEMELYR |
| 1453.707 | 1453.7174 | .0104 | 7 | 1 | 12 | DEPPQSPWDRVK |
| 1467.7914 | 1467.7849 | −.0065 | −4 | 119 | 131 | VEPLRAELQEGAR |
| 1467.7914 | 1467.7849 | −.0065 | −4 | 119 | 131 | VEPLRAELQEGAR |
| 1585.8081 | 1585.8174 | .0093 | 6 | 161 | 173 | THLAPYSDELRQR |
| 1585.8081 | 1585.8174 | .0093 | 6 | 161 | 173 | THLAPYSDELRQR |
| 1612.7854 | 1612.8048 | .0194 | 12 | 46 | 59 | LLDNWDSVTSTF |
| | | | | | | SK |
| 1650.8698 | 1650.8733 | .0035 | 2 | 13 | 27 | DLATVYVDVLKD |
| | | | | | | SGR |
| 1815.8508 | 1815.8446 | −.0062 | −3 | 24 | 40 | DSGRDYVSQFE |
| | | | | | | GSALGK |
| 1815.8508 | 1815.8446 | −.0062 | −3 | 24 | 40 | DSGRDYVSQFE |
| | | | | | | GSALGK |
| 2202.1189 | 2202.0879 | −.031 | −14 | 60 | 77 | LREQLGPVTQEF |
| | | | | | | WDNLEK |

| | |
|---|---|
| unnamed protein product [Homo sapiens] | gi\|215415640 |

[0382] Peptide Information

| | Obsrv. | | | | End | |
|---|---|---|---|---|---|---|
| Calc. Mass | Mass | ±da | ±ppm | Start Seq. | Seq. | Sequence |
| 831.4359 | 831.4695 | .0336 | 40 | 189 | 195 | LAEYHAK |
| 869.5203 | 869.5491 | .0288 | 33 | 117 | 123 | QKVEPLR |
| 873.4424 | 873.4709 | .0285 | 33 | 124 | 131 | AELQEGAR |
| 1012.5786 | 1012.6014 | .0228 | 23 | 207 | 215 | AKPALEDLR |
| 1012.5786 | 1012.6014 | .0228 | 23 | 207 | 215 | AKPALEDLR |
| 1226.5437 | 1226.5634 | .0197 | 16 | 1 | 10 | DEPPQSPWDR |
| 1226.5437 | 1226.5634 | .0197 | 16 | 1 | 10 | DEPPQSPWDR |
| 1252.6208 | 1252.6487 | .0279 | 22 | 97 | 106 | VQPYLDDFQK |
| 1283.6273 | 1283.6271 | −.0002 | 0 | 150 | 160 | DCARAHVDALR |
| 1301.6484 | 1301.66 | .0116 | 9 | 161 | 171 | THLAPYSDELR |
| 1301.6484 | 1301.66 | .0116 | 9 | 161 | 171 | THLAPYSDELR |
| 1323.621 | 1323.6156 | −.0054 | −4 | 78 | 88 | ETEGLRQEMSK |
| 1380.7158 | 1380.7303 | .0145 | 11 | 97 | 107 | VQPYLDDFQKK |
| 1386.7152 | 1386.7365 | .0213 | 15 | 227 | 238 | VSFLSALEEYTK |
| 1400.6693 | 1400.715 | .0457 | 33 | 28 | 40 | DYVSQFEGSAL |
| | | | | | | GK |
| 1411.6675 | 1411.6667 | −.0008 | −1 | 107 | 116 | KWQEEMELYR |
| 1453.707 | 1453.7174 | .0104 | 7 | 1 | 12 | DEPPQSPWDR |
| | | | | | | VK |
| 1467.7914 | 1467.7849 | −.0065 | −4 | 119 | 131 | VEPLRAELQEG |
| | | | | | | AR |
| 1467.7914 | 1467.7849 | −.0065 | −4 | 119 | 131 | VEPLRAELQEG |
| | | | | | | AR |
| 1585.8081 | 1585.8174 | .0093 | 6 | 161 | 173 | THLAPYSDELR |
| | | | | | | QR |
| 1585.8081 | 1585.8174 | .0093 | 6 | 161 | 173 | THLAPYSDELR |
| | | | | | | QR |
| 1612.7854 | 1612.8048 | .0194 | 12 | 46 | 59 | LLDNWDSVTST |
| | | | | | | FSK |
| 1650.8698 | 1650.8733 | .0035 | 2 | 13 | 27 | DLATVYVDVLK |
| | | | | | | DSGR |
| 1815.8508 | 1815.8446 | −.0062 | −3 | 24 | 40 | DSGRDYVSQF |
| | | | | | | EGSALGK |
| 1815.8508 | 1815.8446 | −.0062 | −3 | 24 | 40 | DSGRDYVSQF |
| | | | | | | EGSALGK |
| 2202.1189 | 2202.0879 | −.031 | −14 | 60 | 77 | LREQLGPVTQE |
| | | | | | | FWDNLEK |

| | |
|---|---|
| unnamed protein product [Homo sapiens] | gi\|215415648 |

[0383] Peptide Information

| | Obsrv. | | | Start | | |
|---|---|---|---|---|---|---|
| Calc. Mass | Mass | ±da | ±ppm | Seq. | End Seq. | Sequence |
| 831.4359 | 831.4695 | .0336 | 40 | 189 | 195 | LAEYHAK |
| 869.5203 | 869.5491 | .0288 | 33 | 117 | 123 | QKVEPLR |
| 873.4424 | 873.4709 | .0285 | 33 | 124 | 131 | AELQEGAR |
| 1012.5786 | 1012.6014 | .0228 | 23 | 207 | 215 | AKPALEDLR |
| 1012.5786 | 1012.6014 | .0228 | 23 | 207 | 215 | AKPALEDLR |
| 1226.5437 | 1226.5634 | .0197 | 16 | 1 | 10 | DEPPQSPWDR |
| 1226.5437 | 1226.5634 | .0197 | 16 | 1 | 10 | DEPPQSPWDR |
| 1252.6208 | 1252.6487 | .0279 | 22 | 97 | 106 | VQPYLDDFQK |
| 1283.6273 | 1283.6271 | −.0002 | 0 | 150 | 160 | DCARAHVDALR |
| 1301.6484 | 1301.66 | .0116 | 9 | 161 | 171 | THLAPYSDELR |
| 1301.6484 | 1301.66 | .0116 | 9 | 161 | 171 | THLAPYSDELR |
| 1323.621 | 1323.6156 | −.0054 | −4 | 78 | 88 | ETEGLRQEMSK |
| 1380.7158 | 1380.7303 | .0145 | 11 | 97 | 107 | VQPYLDDFQKK |
| 1386.7152 | 1386.7365 | .0213 | 15 | 227 | 238 | VSFLSALEEYTK |
| 1400.6693 | 1400.715 | .0457 | 33 | 28 | 40 | DYVSQFEGSAL |
| | | | | | | GK |
| 1411.6675 | 1411.6667 | −.0008 | −1 | 107 | 116 | KWQEEMELYR |
| 1453.707 | 1453.7174 | .0104 | 7 | 1 | 12 | DEPPQSPWDR |
| | | | | | | VK |
| 1467.7914 | 1467.7849 | −.0065 | −4 | 119 | 131 | VEPLRAELQEG |
| | | | | | | AR |
| 1467.7914 | 1467.7849 | −.0065 | −4 | 119 | 131 | VEPLRAELQEG |
| | | | | | | AR |
| 1585.8081 | 1585.8174 | .0093 | 6 | 161 | 173 | THLAPYSDELR |
| | | | | | | QR |
| 1585.8081 | 1585.8174 | .0093 | 6 | 161 | 173 | THLAPYSDELR |
| | | | | | | QR |
| 1612.7854 | 1612.8048 | .0194 | 12 | 46 | 59 | LLDNWDSVTST |
| | | | | | | FSK |
| 1650.8698 | 1650.8733 | .0035 | 2 | 13 | 27 | DLATVYVDVLK |
| | | | | | | DSGR |
| 1815.8508 | 1815.8446 | −.0062 | −3 | 24 | 40 | DSGRDYVSQF |
| | | | | | | EGSALGK |
| 1815.8508 | 1815.8446 | −.0062 | −3 | 24 | 40 | DSGRDYVSQF |
| | | | | | | EGSALGK |

| | |
|---|---|
| unnamed protein product [Homo sapiens] | gi\|215415654 |

[0384] Peptide Information

| | Obsrv. | | | Start | End | |
|---|---|---|---|---|---|---|
| Calc. Mass | Mass | ±da | ±ppm | Seq. | Seq. | Sequence |
| 831.4359 | 831.4695 | .0336 | 40 | 189 | 195 | LAEYHAK |
| 869.5203 | 869.5491 | .0288 | 33 | 117 | 123 | QKVEPLR |
| 873.4424 | 873.4709 | .0285 | 33 | 124 | 131 | AELQEGAR |
| 1008.5697 | 1008.5928 | .0231 | 23 | 152 | 160 | ARAHVDALR |
| 1226.5437 | 1226.5634 | .0197 | 16 | 1 | 10 | DEPPQSPWDR |
| 1226.5437 | 1226.5634 | .0197 | 16 | 1 | 10 | DEPPQSPWDR |
| 1252.6208 | 1252.6487 | .0279 | 22 | 97 | 106 | VQPYLDDFQK |
| 1283.5725 | 1283.6271 | .0546 | 43 | 108 | 116 | WQEEMELYR |
| | 1283.6271 | | | | | |
| 1301.6484 | 1301.66 | .0116 | 9 | 161 | 171 | THLAPYSDELR |
| 1301.6484 | 1301.66 | .0116 | 9 | 161 | 171 | THLAPYSDELR |
| 1311.5555 | 1311.5947 | .0392 | 30 | 78 | 88 | ETEGLCQEMSK |
| 1318.642 | 1318.6689 | .0269 | 20 | 141 | 151 | LSPLGEEMRDR |
| 1327.5505 | 1327.6265 | .076 | 57 | 78 | 88 | ETEGLCQEMSK |
| 1380.7158 | 1380.7303 | .0145 | 11 | 97 | 107 | VQPYLDDFQKK |
| 1386.7152 | 1386.7365 | .0213 | 15 | 227 | 238 | VSFLSALEEYTK |
| 1400.6693 | 1400.715 | .0457 | 33 | 28 | 40 | DYVSQFEGSALGK |
| 1411.6675 | 1411.6667 | −.0008 | −1 | 107 | 116 | KWQEEMELYR |
| 1453.707 | 1453.7174 | .0104 | 7 | 1 | 12 | DEPPQSPWDRVK |
| 1467.7914 | 1467.7849 | −.0065 | −4 | 119 | 131 | VEPLRAELQEGAR |
| 1467.7914 | 1467.7849 | −.0065 | −4 | 119 | 131 | VEPLRAELQEGAR |
| 1585.8081 | 1585.8174 | .0093 | 6 | 161 | 173 | THLAPYSDELRQR |
| 1585.8081 | 1585.8174 | .0093 | 6 | 161 | 173 | THLAPYSDELRQR |
| 1612.7854 | 1612.8048 | .0194 | 12 | 46 | 59 | LLDNWDSVTSTFSK |
| 1650.8698 | 1650.8733 | .0035 | 2 | 13 | 27 | DLATVYVDVLKDSGR |
| 1815.8508 | 1815.8446 | −.0062 | −3 | 24 | 40 | DSGRDYVSQFEGSALGK |
| 1815.8508 | 1815.8446 | −.0062 | −3 | 24 | 40 | DSGRDYVSQFEGSALGK |
| 2202.1189 | 2202.0879 | −.031 | −14 | 60 | 77 | LREQLGPVTQEFWDNLEK |

| | |
|---|---|
| unnamed protein product [Homo sapiens] | gi\|215415628 |

[0385] Peptide Information

| | | | | Start | End | |
|---|---|---|---|---|---|---|
| Calc. Mass | Obsrv. Mass | ±da | ±ppm | Seq. | Seq. | Sequence |
| 831.4359 | 831.4695 | .0336 | 40 | 189 | 195 | LAEYHAK |
| 869.5203 | 869.5491 | .0288 | 33 | 117 | 123 | QKVEPLR |
| 873.4424 | 873.4709 | .0285 | 33 | 124 | 131 | AELQEGAR |
| 1008.5697 | 1008.5928 | .0231 | 23 | 152 | 160 | ARAHVDALR |
| 1226.5437 | 1226.5634 | .0197 | 16 | 1 | 10 | DEPPQSPWDR |
| 1226.5437 | 1226.5634 | .0197 | 16 | 1 | 10 | DEPPQSPWDR |
| 1252.6208 | 1252.6487 | .0279 | 22 | 97 | 106 | VQPYLDDFQK |
| 1283.5725 | 1283.6271 | .0546 | 43 | 108 | 116 | WQEEMELYR |
| 1301.6484 | 1301.66 | .0116 | 9 | 161 | 171 | THLAPYSDELR |
| 1301.6484 | 1301.66 | .0116 | 9 | 161 | 171 | THLAPYSDELR |
| 1318.642 | 1318.6689 | .0269 | 20 | 141 | 151 | LSPLGEEMRDR |
| 1323.621 | 1323.6156 | −.0054 | −4 | 78 | 88 | ETEGLRQEMSK |
| 1380.7158 | 1380.7303 | .0145 | 11 | 97 | 107 | VQPYLDDFQKK |
| 1386.7152 | 1386.7365 | .0213 | 15 | 227 | 238 | VSFLSALEEYTK |
| 1400.6693 | 1400.715 | .0457 | 33 | 28 | 40 | DYVSQFEGSALGK |
| 1411.6675 | 1411.6667 | −.0008 | −1 | 107 | 116 | KWQEEMELYR |
| 1453.707 | 1453.7174 | .0104 | 7 | 1 | 12 | DEPPQSPWDRVK |
| 1467.7914 | 1467.7849 | −.0065 | −4 | 119 | 131 | VEPLRAELQEGAR |
| 1467.7914 | 1467.7849 | −.0065 | −4 | 119 | 131 | VEPLRAELQEGAR |
| 1585.8081 | 1585.8174 | .0093 | 6 | 161 | 173 | THLAPYSDELRQR |
| 1585.8081 | 1585.8174 | .0093 | 6 | 161 | 173 | THLAPYSDELRQR |
| 1612.7854 | 1612.8048 | .0194 | 12 | 46 | 59 | LLDNWDSVTSTFSK |
| 1650.8698 | 1650.8733 | .0035 | 2 | 13 | 27 | DLATVYVDVLKDSGR |
| 1815.8508 | 1815.8446 | −.0062 | −3 | 24 | 40 | DSGRDYVSQFEGSALGK |
| 1815.8508 | 1815.8446 | −.0062 | −3 | 24 | 40 | DSGRDYVSQFEGSALGK |
| 2202.1189 | 2202.0879 | −.031 | −14 | 60 | 77 | LREQLGPVTQEFWDNLE K |

| | |
|---|---|
| unnamed protein product [Homo sapiens] | gi\|215415634 |

[0386] Peptide Information

| | Obsrv. | | | Start | | |
|---|---|---|---|---|---|---|
| Calc. Mass | Mass | ±da | ±ppm | Seq. | End Seq. | Sequence |
| 831.4359 | 831.4695 | .0336 | 40 | 189 | 195 | LAEYHAK |
| 869.5203 | 869.5491 | .0288 | 33 | 117 | 123 | QKVEPLR |
| 873.4424 | 873.4709 | .0285 | 33 | 124 | 131 | AELQEGAR |
| 1008.5697 | 1008.5928 | .0231 | 23 | 152 | 160 | ARAHVDALR |
| 1012.5786 | 1012.6014 | .0228 | 23 | 207 | 215 | AKPALEDLR |
| 1012.5786 | 1012.6014 | .0228 | 23 | 207 | 215 | AKPALEDLR |
| 1252.6208 | 1252.6487 | .0279 | 22 | 97 | 106 | VQPYLDDFQK |
| 1283.5725 | 1283.6271 | .0546 | 43 | 108 | 116 | WQEEMELYR |
| 1301.6484 | 1301.66 | .0116 | 9 | 161 | 171 | THLAPYSDELR |
| 1301.6484 | 1301.66 | .0116 | 9 | 161 | 171 | THLAPYSDELR |
| 1318.642 | 1318.6689 | .0269 | 20 | 141 | 151 | LSPLGEEMRDR |
| 1323.621 | 1323.6156 | −.0054 | −4 | 78 | 88 | ETEGLRQEMSK |
| 1380.7158 | 1380.7303 | .0145 | 11 | 97 | 107 | VQPYLDDFQKK |
| 1386.7152 | 1386.7365 | .0213 | 15 | 227 | 238 | VSFLSALEEYTK |
| 1400.6693 | 1400.715 | .0457 | 33 | 28 | 40 | DYVSQFEGSAL |
| | | | | | | GK |
| 1411.6675 | 1411.6667 | −.0008 | −1 | 107 | 116 | KWQEEMELYR |
| 1467.7914 | 1467.7849 | −.0065 | −4 | 119 | 131 | VEPLRAELQEG |
| | | | | | | AR |
| 1467.7914 | 1467.7849 | −.0065 | −4 | 119 | 131 | VEPLRAELQEG |
| | | | | | | AR |
| | 1467.7849 | | | | | |
| 1585.8081 | 1585.8174 | .0093 | 6 | 161 | 173 | THLAPYSDELR |
| | | | | | | QR |
| 1612.7854 | 1612.8048 | .0194 | 12 | 46 | 59 | LLDNWDSVTST |
| | | | | | | FSK |
| 1650.8698 | 1650.8733 | .0035 | 2 | 13 | 27 | DLATVYVDVLK |
| | | | | | | DSGR |
| 1815.8508 | 1815.8446 | −.0062 | −3 | 24 | 40 | DSGRDYVSQF |
| | | | | | | EGSALGK |
| 1815.8508 | 1815.8446 | −.0062 | −3 | 24 | 40 | DSGRDYVSQF |
| | | | | | | EGSALGK |
| 2202.1189 | 2202.0879 | −.031 | −14 | 60 | 77 | LREQLGPVTQE |
| | | | | | | FWDNLEK |

| | |
|---|---|
| unnamed protein product [Homo sapiens] | gi\|215415650 |

[0387] Peptide Information

| | | | | Start | | |
|---|---|---|---|---|---|---|
| Calc. Mass | Obsrv. Mass | ±da | ±ppm | Seq. | End Seq. | Sequence |
| 831.4359 | 831.4695 | .0336 | 40 | 189 | 195 | LAEYHAK |
| 869.5203 | 869.5491 | .0288 | 33 | 117 | 123 | QKVEPLR |
| 873.4424 | 873.4709 | .0285 | 33 | 124 | 131 | AELQEGAR |
| 1008.5697 | 1008.5928 | .0231 | 23 | 152 | 160 | ARAHVDALR |
| 1012.5786 | 1012.6014 | .0228 | 23 | 207 | 215 | AKPALEDLR |
| 1012.5786 | 1012.6014 | .0228 | 23 | 207 | 215 | AKPALEDLR |
| 1226.5437 | 1226.5634 | .0197 | 16 | 1 | 10 | DEPPQSPWDR |
| 1226.5437 | 1226.5634 | .0197 | 16 | 1 | 10 | DEPPQSPWDR |
| 1252.6208 | 1252.6487 | .0279 | 22 | 97 | 106 | VQPYLDDFQK |
| 1283.5725 | 1283.6271 | .0546 | 43 | 108 | 116 | WQEEMELYR |
| 1301.6484 | 1301.66 | .0116 | 9 | 161 | 171 | THLAPYSDELR |
| 1301.6484 | 1301.66 | .0116 | 9 | 161 | 171 | THLAPYSDELR |
| 1311.5555 | 1311.5947 | .0392 | 30 | 78 | 88 | ETEGLCQEMSK |
| 1318.642 | 1318.6689 | .0269 | 20 | 141 | 151 | LSPLGEEMRDR |
| 1327.5505 | 1327.6265 | .076 | 57 | 78 | 88 | ETEGLCQEMSK |
| 1380.7158 | 1380.7303 | .0145 | 11 | 97 | 107 | VQPYLDDFQKK |
| 1386.7152 | 1386.7365 | .0213 | 15 | 227 | 238 | VSFLSALEEYTK |
| 1400.6693 | 1400.715 | .0457 | 33 | 28 | 40 | DYVSQFEGSALGK |
| 1411.6675 | 1411.6667 | −.0008 | −1 | 107 | 116 | KWQEEMELYR |
| 1453.707 | 1453.7174 | .0104 | 7 | 1 | 12 | DEPPQSPW |
| | | | | | | DRVK |
| 1467.7914 | 1467.7849 | −.0065 | −4 | 119 | 131 | VEPLRAELQ |
| | | | | | | EGAR |
| 1467.7914 | 1467.7849 | −.0065 | −4 | 119 | 131 | VEPLRAELQ |
| | | | | | | EGAR |
| 1612.7854 | 1612.8048 | .0194 | 12 | 46 | 59 | LLDNWDSVT |
| | | | | | | STFSK |
| 1650.8698 | 1650.8733 | .0035 | 2 | 13 | 27 | DLATVYVDV |
| | | | | | | LKDSGR |
| 1815.8508 | 1815.8446 | −.0062 | −3 | 24 | 40 | DSGRDYVSQF |
| | | | | | | EGSALGK |
| 1815.8508 | 1815.8446 | −.0062 | −3 | 24 | 40 | DSGRDYVSQF |
| | | | | | | EGSALGK |
| 2202.1189 | 2202.0879 | −.031 | −14 | 60 | 77 | LREQLGPVTQE |
| | | | | | | FWDNLEK |

| | |
|---|---|
| unnamed protein product [Homo sapiens] | gi\|215415626 |

[0388] Peptide Information

| | | | | Start | End | |
|---|---|---|---|---|---|---|
| Calc. Mass | Obsrv. Mass | ±da | ±ppm | Seq. | Seq. | Sequence |
| 831.4359 | 831.4695 | .0336 | 40 | 189 | 195 | LAEYHAK |
| 1008.5697 | 1008.5928 | .0231 | 23 | 152 | 160 | ARAHVDALR |
| 1012.5786 | 1012.6014 | .0228 | 23 | 207 | 215 | AKPALEDLR |
| 1012.5786 | 1012.6014 | .0228 | 23 | 207 | 215 | AKPALEDLR |
| 1226.5437 | 1226.5634 | .0197 | 16 | 1 | 10 | DEPPQSPWDR |
| 1226.5437 | 1226.5634 | .0197 | 16 | 1 | 10 | DEPPQSPWDR |
| 1252.6208 | 1252.6487 | .0279 | 22 | 97 | 106 | VQPYLDDFQK |
| 1283.5725 | 1283.6271 | .0546 | 43 | 108 | 116 | WQEEMELYR |
| 1301.6484 | 1301.66 | .0116 | 9 | 161 | 171 | THLAPYSDELR |
| 1301.6484 | 1301.66 | .0116 | 9 | 161 | 171 | THLAPYSDELR |
| 1318.642 | 1318.6689 | .0269 | 20 | 141 | 151 | LSPLGEEMRDR |
| 1323.621 | 1323.6156 | −.0054 | −4 | 78 | 88 | ETEGLRQEMSK |
| 1380.7158 | 1380.7303 | .0145 | 11 | 97 | 107 | VQPYLDDFQKK |
| 1386.7152 | 1386.7365 | .0213 | 15 | 227 | 238 | VSFLSALEEYTK |
| 1400.6693 | 1400.715 | .0457 | 33 | 28 | 40 | DYVSQFEGSALGK |
| 1411.6675 | 1411.6667 | −.0008 | −1 | 107 | 116 | KWQEEMELYR |
| 1453.707 | 1453.7174 | .0104 | 7 | 1 | 12 | DEPPQSPWDRVK |
| 1585.8081 | 1585.8174 | .0093 | 6 | 161 | 173 | THLAPYSDELRQR |
| 1585.8081 | 1585.8174 | .0093 | 6 | 161 | 173 | THLAPYSDELRQR |
| 1612.7854 | 1612.8048 | .0194 | 12 | 46 | 59 | LLDNWDSVTSTFSK |
| 1650.8698 | 1650.8733 | .0035 | 2 | 13 | 27 | DLATVYVDVLKDSGR |
| 1815.8508 | 1815.8446 | −.0062 | −3 | 24 | 40 | DSGRDYVSQFEGSALGK |
| 1815.8508 | 1815.8446 | −.0062 | −3 | 24 | 40 | DSGRDYVSQFEGSALGK |
| 2202.1189 | 2202.0879 | −.031 | −14 | 60 | 77 | LREQLGPVTQEFWDNLEK |

| | |
|---|---|
| proapolipoprotein [Homo sapiens] | gi\|178775 |

[0389] Peptide Information

| | Obsrv. | | | Start | | |
|---|---|---|---|---|---|---|
| Calc. Mass | Mass | ±da | ±ppm | Seq. | End Seq. | Sequence |
| 831.4359 | 831.4695 | .0336 | 40 | 195 | 201 | LAEYHAK |
| 869.5203 | 869.5491 | .0288 | 33 | 123 | 129 | QKVEPLR |
| 873.4424 | 873.4709 | .0285 | 33 | 130 | 137 | AELQEGAR |
| 1008.5697 | 1008.5928 | .0231 | 23 | 158 | 166 | ARAHVDALR |
| 1012.5786 | 1012.6014 | .0228 | 23 | 213 | 221 | AKPALEDLR |
| 1012.5786 | 1012.6014 | .0228 | 23 | 213 | 221 | AKPALEDLR |
| 1252.6208 | 1252.6487 | .0279 | 22 | 103 | 112 | VQPYLDDFQK |
| 1283.5725 | 1283.6271 | .0546 | 43 | 114 | 122 | WQEEMELYR |
| 1301.6484 | 1301.66 | .0116 | 9 | 167 | 177 | THLAPYSDELR |
| 1301.6484 | 1301.66 | .0116 | 9 | 167 | 177 | THLAPYSDELR |
| 1318.642 | 1318.6689 | .0269 | 20 | 147 | 157 | LSPLGEEMRDR |
| 1323.621 | 1323.6156 | −.0054 | −4 | 84 | 94 | ETEGLRQEMSK |
| 1380.7158 | 1380.7303 | .0145 | 11 | 103 | 113 | VQPYLDDFQKK |
| 1386.7152 | 1386.7365 | .0213 | 15 | 233 | 244 | VSFLSALEEYTK |
| 1400.6693 | 1400.715 | .0457 | 33 | 34 | 46 | DYVSQFEGSAL |
| | | | | | | GK |
| 1411.6675 | 1411.6667 | −.0008 | −1 | 113 | 122 | KWQEEMELYR |
| 1467.7914 | 1467.7849 | −.0065 | −4 | 125 | 137 | VEPLRAELQEG |
| | | | | | | AR |
| 1467.7914 | 1467.7849 | −.0065 | −4 | 125 | 137 | VEPLRAELQEG |
| | | | | | | AR |
| 1585.8081 | 1585.8174 | .0093 | 6 | 167 | 179 | THLAPYSDELR |
| | | | | | | QR |
| 1585.8081 | 1585.8174 | .0093 | 6 | 167 | 179 | THLAPYSDELR |
| | | | | | | QR |
| 1612.7854 | 1612.8048 | .0194 | 12 | 52 | 65 | LLDNWDSVTST |
| | | | | | | FSK |
| 1650.8698 | 1650.8733 | .0035 | 2 | 19 | 33 | DLATVYVDVLK |
| | | | | | | DSGR |
| 1815.8508 | 1815.8446 | −.0062 | −3 | 30 | 46 | DSGRDYVSQF |
| | | | | | | EGSALGK |
| 1815.8508 | 1815.8446 | −.0062 | −3 | 30 | 46 | DSGRDYVSQF |
| | | | | | | EGSALGK |
| 2202.1189 | 2202.0879 | −.031 | −14 | 66 | 83 | LREQLGPVTQE |
| | | | | | | FWDNLEK |

| | |
|---|---|
| unnamed protein product [Homo sapiens] | gi\|215415624 |

[0390] Peptide Information

| | | | | Start | | |
|---|---|---|---|---|---|---|
| Calc. Mass | Obsrv. Mass | ±da | ±ppm | Seq. | End Seq. | Sequence |
| 831.4359 | 831.4695 | .0336 | 40 | 189 | 195 | LAEYHAK |
| 869.5203 | 869.5491 | .0288 | 33 | 117 | 123 | QKVEPLR |
| 873.4424 | 873.4709 | .0285 | 33 | 124 | 131 | AELQEGAR |
| 1008.5697 | 1008.5928 | .0231 | 23 | 152 | 160 | ARAHVDALR |
| 1012.5786 | 1012.6014 | .0228 | 23 | 207 | 215 | AKPALEDLR |
| 1012.5786 | 1012.6014 | .0228 | 23 | 207 | 215 | AKPALEDLR |
| 1226.5437 | 1226.5634 | .0197 | 16 | 1 | 10 | DEPPQSP |
| | | | | | | WDR |
| 1226.5437 | 1226.5634 | .0197 | 16 | 1 | 10 | DEPPQSP |
| | | | | | | WDR |
| 1252.6208 | 1252.6487 | .0279 | 22 | 97 | 106 | VQPYLDD |
| | | | | | | FQK |
| 1283.5725 | 1283.6271 | .0546 | 43 | 108 | 116 | WQEEME |
| | | | | | | LYR |
| 1301.6484 | 1301.66 | .0116 | 9 | 161 | 171 | THLAPYS |
| | | | | | | DELR |
| 1301.6484 | 1301.66 | .0116 | 9 | 161 | 171 | THLAPYSDELR |
| 1318.642 | 1318.6689 | .0269 | 20 | 141 | 151 | LSPLGEEMRDR |
| 1323.621 | 1323.6156 | −.0054 | −4 | 78 | 88 | ETEGLRQEMSK |
| 1380.7158 | 1380.7303 | .0145 | 11 | 97 | 107 | VQPYLDDFQKK |
| 1386.7152 | 1386.7365 | .0213 | 15 | 227 | 238 | VSFLSALEEYTK |
| 1400.6693 | 1400.715 | .0457 | 33 | 28 | 40 | DYVSQFEGSAL |
| | | | | | | GK |
| 1411.6675 | 1411.6667 | −.0008 | −1 | 107 | 116 | KWQEEMELYR |
| 1453.707 | 1453.7174 | .0104 | 7 | 1 | 12 | DEPPQSPWDR |
| | | | | | | VK |
| 1467.7914 | 1467.7849 | −.0065 | −4 | 119 | 131 | VEPLRAELQEG |
| | | | | | | AR |
| 1467.7914 | 1467.7849 | −.0065 | −4 | 119 | 131 | VEPLRAELQEG |
| | | | | | | AR |
| 1612.7854 | 1612.8048 | .0194 | 12 | 46 | 59 | LLDNWDSVTST |
| | | | | | | FSK |
| 1650.8698 | 1650.8733 | .0035 | 2 | 13 | 27 | DLATVYVDVLK |
| | | | | | | DSGR |
| 1815.8508 | 1815.8446 | −.0062 | −3 | 24 | 40 | DSGRDYVSQF |
| | | | | | | EGSALGK |
| 1815.8508 | 1815.8446 | −.0062 | −3 | 24 | 40 | DSGRDYVSQF |
| | | | | | | EGSALGK |
| 2202.1189 | 2202.0879 | −.031 | −14 | 60 | 77 | LREQLGPVTQE |
| | | | | | | FWDNLE K |

| | |
|---|---|
| unnamed protein product [Homo sapiens] | gi\|215415646 |

[0391] Peptide Information

| | Obsrv. | | | Start | End | |
|---|---|---|---|---|---|---|
| Calc. Mass | Mass | ±da | ±ppm | Seq. | Seq. | Sequence |
| 831.4359 | 831.4695 | .0336 | 40 | 189 | 195 | LAEYHAK |
| 869.5203 | 869.5491 | .0288 | 33 | 117 | 123 | QKVEPLR |
| 873.4424 | 873.4709 | .0285 | 33 | 124 | 131 | AELQEGAR |
| 1008.5697 | 1008.5928 | .0231 | 23 | 152 | 160 | ARAHVDALR |
| 1226.5437 | 1226.5634 | .0197 | 16 | 1 | 10 | DEPPQSPWDR |
| 1226.5437 | 1226.5634 | .0197 | 16 | 1 | 10 | DEPPQSPWDR |
| 1252.6208 | 1252.6487 | .0279 | 22 | 97 | 106 | VQPYLDDFQK |
| 1283.5725 | 1283.6271 | .0546 | 43 | 108 | 116 | WQEEMELYR |
| 1301.6484 | 1301.66 | .0116 | 9 | 161 | 171 | THLAPYSDELR |
| 1301.6484 | 1301.66 | .0116 | 9 | 161 | 171 | THLAPYSDELR |
| 1318.642 | 1318.6689 | .0269 | 20 | 141 | 151 | LSPLGEEMRDR |
| 1323.621 | 1323.6156 | −.0054 | −4 | 78 | 88 | ETEGLRQEMSK |
| | 1323.6156 | | | | | |
| 1380.7158 | 1380.7303 | .0145 | 11 | 97 | 107 | VQPYLDDFQKK |
| 1386.7152 | 1386.7365 | .0213 | 15 | 227 | 238 | VSFLSALEEYTK |
| 1400.6693 | 1400.715 | .0457 | 33 | 28 | 40 | DYVSQFEGSALGK |
| 1411.6675 | 1411.6667 | −.0008 | −1 | 107 | 116 | KWQEEMELYR |
| 1453.707 | 1453.7174 | .0104 | 7 | 1 | 12 | DEPPQSPWDRVK |
| 1467.7914 | 1467.7849 | −.0065 | −4 | 119 | 131 | VEPLRAELQEGAR |
| 1467.7914 | 1467.7849 | −.0065 | −4 | 119 | 131 | VEPLRAELQEGAR |
| 1585.8081 | 1585.8174 | .0093 | 6 | 161 | 173 | THLAPYSDELRQR |
| 1585.8081 | 1585.8174 | .0093 | 6 | 161 | 173 | THLAPYSDELRQR |
| 1612.7854 | 1612.8048 | .0194 | 12 | 46 | 59 | LLDNWDSVTSTFSK |
| 1650.8698 | 1650.8733 | .0035 | 2 | 13 | 27 | DLATVYVDVLKDSGR |
| 1815.8508 | 1815.84 | −.0062 | — | 2 | 40 | DSGRDYVSQF |
| 1815.8508 | 1815.84 | −.0062 | — | 2 | 40 | DSGRDYVSQF |

| | |
|---|---|
| apolipoprotein A-I preproprotein [Homo sapiens] | gi\|4557321 |

[0392] Protein Group

| | |
|---|---|
| ApoA-I [Homo sapiens] | gi\|296729 |
| Apolipoprotein A-I [Homo sapiens] | gi\|82571472 |
| Apolipoprotein A-I [Homo sapiens] | gi\|13529242 |
| RecName: Full = Apolipoprotein A-I; Short = Apo-AI; | gi\|113992 |
| Short = ApoA-I; AltName: Full = Apolipoprotein A1; | |
| Contains: RecName: | |
| Full = Apolipoprotein A-I(1-242); Flags: | |
| Precursor | |
| apolipoprotein A-I [Homo sapiens] | gi\|37499465 |
| apolipoprotein A-I [Homo sapiens] | gi\|45593391 |
| apolipoprotein A-I precursor variant 1 [Homo sapiens] | gi\|167887482 |
| apolipoprotein A-I precursor variant 2 [Homo sapiens] | gi\|167887483 |
| apolipoprotein A-I precursor variant 3 [Homo sapiens] | gi\|167887484 |
| apolipoprotein A-I precursor variant 4 [Homo sapiens] | gi\|167887485 |
| apolipoprotein A-I precursor variant 5 [Homo sapiens] | gi\|167887486 |
| apolipoprotein A-I, isoform CRA_a [Homo sapiens] | gi\|119587680 |
| apolipoprotein A-I, isoform CRA_a [Homo sapiens] | gi\|119587679 |
| apolipoprotein A-I, isoform CRA_a [Homo sapiens] | gi\|119587678 |
| apolipoprotein AI precursor [Homo sapiens] | gi\|296635 |
| apolipoprotein AI | |
| precursor [Homo | |
| sapiens] | |
| preproapolipoprotein A-I [Homo sapiens] | gi\|178768 |
| preproapolipoprotein AI [Homo sapiens] | gi\|28772 |
| preproapolipoprotein [Homo sapiens] | gi\|512410 |
| proapolipoprotein [Homo sapiens] | gi\|178773 |
| unnamed protein product [Homo sapiens] | gi\|732753 |
| unnamed protein product [Homo sapiens] | gi\|158257894 |

[0393] Peptide Information

| | | | | Start | | |
|---|---|---|---|---|---|---|
| Calc. Mass | Obsrv. Mass | ±da | ±ppm | Seq. | End Seq. | Sequence |
| 831.4359 | 831.4695 | .0336 | 40 | 213 | 219 | LAEYHAK |
| 869.5203 | 869.5491 | .0288 | 33 | 141 | 147 | QKVEPLR |
| 873.4424 | 873.4709 | .0285 | 33 | 148 | 155 | AELQEGAR |
| 1008.5697 | 1008.5928 | .0231 | 23 | 176 | 184 | ARAHVDALR |
| 1012.5786 | 1012.6014 | .0228 | 23 | 231 | 239 | AKPALEDLR |
| 1012.5786 | 1012.6014 | .0228 | 23 | 231 | 239 | AKPALEDLR |
| 1252.6208 | 1252.6487 | .0279 | 22 | 121 | 130 | VQPYLDDFQK |
| 1283.5725 | 1283.6271 | .0546 | 43 | 132 | 140 | WQEEMELYR |
| 1301.6484 | 1301.66 | .0116 | 9 | 185 | 195 | THLAPYSDELR |
| 1301.6484 | 1301.66 | .0116 | 9 | 185 | 195 | THLAPYSDELR |
| 1318.642 | 1318.6689 | .0269 | 20 | 165 | 175 | LSPLGEEMRDR |
| 1323.621 | 1323.6156 | −.0054 | −4 | 102 | 112 | ETEGLRQEMSK |
| 1380.7158 | 1380.7303 | .0145 | 11 | 121 | 131 | VQPYLDDFQKK |
| 1386.7152 | 1386.7365 | .0213 | 15 | 251 | 262 | VSFLSALEEYTK |
| 1400.6693 | 1400.715 | .0457 | 33 | 52 | 64 | DYVSQFEGSAL |
| | | | | | | GK |
| 1411.6675 | 1411.6667 | −.0008 | −1 | 131 | 140 | KWQEEMELYR |
| 1467.7914 | 1467.7849 | −.0065 | −4 | 143 | 155 | VEPLRAELQEG |
| | | | | | | AR |
| 1467.7914 | 1467.7849 | −.0065 | −4 | 143 | 155 | VEPLRAELQEG |
| | | | | | | AR |
| 1585.8081 | 1585.8174 | .0093 | 6 | 185 | 197 | THLAPYSDELR |
| | | | | | | QR |
| 1585.8081 | 1585.8174 | .0093 | 6 | 185 | 197 | THLAPYSDELR |
| | | | | | | QR |
| 1612.7854 | 1612.8048 | .0194 | 12 | 70 | 83 | LLDNWDSVTST |
| | | | | | | FSK |
| 1650.8698 | 1650.8733 | .0035 | 2 | 37 | 51 | DLATVYVDVLK |
| | | | | | | DSGR |
| 1815.8508 | 1815.8446 | −.0062 | −3 | 48 | 64 | DSGRDYVSQF |
| | | | | | | EGSALGK |
| 1815.8508 | 1815.8446 | −.0062 | −3 | 48 | 64 | DSGRDYVSQF |
| | | | | | | EGSALGK |
| 2202.1189 | 2202.0879 | −.031 | −14 | 84 | 101 | LREQLGPVTQE |
| | | | | | | FWDNLEK |

| | |
|---|---|
| unnamed protein product [Homo sapiens] | gi\|215415644 |

[0394] Peptide Information

| | | | | Start | End | |
|---|---|---|---|---|---|---|
| Calc. Mass | Obsrv. Mass | ±da | ±ppm | Seq. | Seq. | Szequence |
| 831.4359 | 831.4695 | .0336 | .0 | 89 | 95 | [symbol] AEYHAK |
| 869.5203 | 869.5491 | .0288 | [symbol] 3 | 17 | 23 | [symbol] KVEPLR |
| 873.4424 | 873.4709 | .0285 | [symbol] 3 | 24 | 31 | [symbol] ELQEGAR |
| 1008.5697 | 1008.5928 | .0231 | [symbol] 3 | 52 | 60 | [symbol] RAHVDALR |
| 1012.5786 | 1012.6014 | .0228 | [symbol] 3 | [symbol] 07 | [symbol] 15 | [symbol] KPALEDLR |
| 1012.5786 | 1012.6014 | .0228 | [symbol] 3 | [symbol] 07 | [symbol] 15 | [symbol] KPALEDLR |
| 1226.5437 | 1226.5634 | .0197 | 6 | | 0 | [symbol] EPPQSPWDR |
| 1226.5437 | 1226.5634 | .0197 | 6 | | 0 | [symbol] EPPQSPWDR |
| 1252.6208 | 1252.6487 | .0279 | [symbol] 2 | [symbol] 7 | 06 | [symbol] QPYLDDFQK |
| 1283.5725 | 1283.6271 | .0546 | [symbol] 3 | 08 | 16 | VQEEMELYR |
| 1301.6484 | 1301.66 | .0116 | [symbol] | 61 | 71 | ⁻HLAPYSDELR |
| 1301.6484 | 1301.66 | .0116 | [symbol] | 61 | 71 | ⁻HLAPYSDELR |
| 1318.642 | 1318.6689 | .0269 | [symbol] 0 | 41 | 51 | [symbol] SPLGEEMRDR |
| 1323.621 | 1323.6156 | −.0054 | 4 | [symbol] 8 | [symbol] 8 | [symbol] TEGLRQEMSK |
| 1380.7158 | 1380.7303 | .0145 | 1 | [symbol] 7 | 07 | [symbol] QPYLDDFQKK |
| 1386.7152 | 1386.7365 | .0213 | 5 | [symbol] 27 | [symbol] 38 | [symbol] SFLSALEEYTK |
| 1400.6693 | 1400.715 | .0457 | [symbol] 3 | [symbol] 8 | [symbol] 0 | [symbol] YVSQFEGSALGK |
| 1411.6675 | 1411.6667 | −.0008 | 1 | 07 | 16 | [symbol] WQEEMELYR |
| 1453.707 | 1453.7174 | .0104 | [symbol] | | 2 | [symbol] EPPQSPWDRVK |
| 1467.7914 | 1467.7849 | −.0065 | 4 | 19 | 31 | [symbol] EPLRAELQEGAR |
| 1467.7914 | 1467.7849 | −.0065 | 4 | 19 | 31 | [symbol] EPLRAELQEGAR |
| 1612.7854 | 1612.8048 | .0194 | 2 | [symbol] 6 | [symbol] 9 | [symbol] LDNWDSVTSTFSK |
| 1650.8698 | 1650.8733 | .0035 | [symbol] | 3 | [symbol] 7 | [symbol] LATVYVDVLKDSGR |
| 1815.8508 | 1815.8446 | −.0062 | 3 | [symbol] 4 | [symbol] 0 | [symbol] SGRDYVSQFEGS |
| | | | | | | ALGK |
| 1815.8508 | 1815.8446 | −.0062 | 3 | [symbol] 4 | .0 | [symbol] SGRDYVSQFEGS |
| | | | | | | ALGK |

| | |
|---|---|
| unnamed protein product [Homo sapiens] | gi\|215415658 |

[symbol]

indicates data missing or illegible when filed

[0395] Peptide Information

| | | | | Start | End | |
|---|---|---|---|---|---|---|
| Calc. Mass | Obsrv. Mass | ±da | ±ppm | Seq. | Seq. | Sequence |
| 831.4359 | 831.4695 | .0336 | [symbol] 0 | 89 | 95 | [symbol] AEYHAK |
| 869.5203 | 869.5491 | .0288 | [symbol] 3 | 17 | 23 | [symbol] KVEPLR |
| 873.4424 | 873.4709 | .0285 | [symbol] 3 | 24 | 31 | [symbol] ELQEGAR |
| 1226.5437 | 1226.5634 | .0197 | 6 | | 0 | [symbol] EPPQSPWDR |
| 1226.5437 | 1226.5634 | .0197 | 6 | | 0 | [symbol] EPPQSPWDR |
| | 1226.5634 | | | | | |
| 1252.6208 | 1252.6487 | .0279 | [symbol] 2 | [symbol] 7 | 06 | [symbol] QPYLDDFQK |
| 1283.6273 | 1283.6271 | −.0002 | [symbol] | 50 | 60 | [symbol] CARAHVDALR |
| 1301.6484 | 1301.66 | .0116 | [symbol] | 61 | 71 | ⁻HLAPYSDELR |
| 1301.6484 | 1301.66 | .0116 | [symbol] | 61 | 71 | ⁻HLAPYSDELR |
| 1323.621 | 1323.6156 | −.0054 | 4 | [symbol] 8 | [symbol] 8 | [symbol] TEGLRQEMSK |
| 1380.7158 | 1380.7303 | .0145 | 1 | [symbol] 7 | 07 | [symbol] QPYLDDFQKK |
| 1386.7152 | 1386.7365 | .0213 | 5 | [symbol] 27 | [symbol] 38 | [symbol] SFLSALEEYTK |
| 1400.6693 | 1400.715 | .0457 | [symbol] 3 | [symbol] 8 | [symbol] 0 | [symbol] YVSQFEGSALGK |
| 1411.6675 | 1411.6667 | −.0008 | 1 | 07 | 16 | [symbol] WQEEMELYR |
| 1453.707 | 1453.7174 | .0104 | [symbol] | | 2 | [symbol] EPPQSPWDRVK |
| 1467.7914 | 1467.7849 | −.0065 | 4 | 19 | 31 | [symbol] EPLRAELQEGAR |
| 1467.7914 | 1467.7849 | −.0065 | 4 | 19 | 31 | [symbol] EPLRAELQEGAR |
| 1585.8081 | 1585.8174 | .0093 | [symbol] | 61 | 73 | ⁻HLAPYSDELRQR |
| 1585.8081 | 1585.8174 | .0093 | [symbol] | 61 | 73 | ⁻HLAPYSDELRQR |
| 1612.7854 | 1612.8048 | .0194 | 2 | [symbol] 6 | [symbol] 9 | [symbol] LDNWDSVTSTFSK |
| 1650.8698 | 1650.8733 | .0035 | [symbol] | 3 | [symbol] 7 | [symbol] LATVYVDVLKDSGR |
| 1815.8508 | 1815.8446 | −.0062 | 3 | [symbol] 4 | [symbol] 0 | [symbol] SGRDYVSQFEGS |
| | | | | | | ALGK |
| 1815.8508 | 1815.8446 | −.0062 | 3 | [symbol] 4 | [symbol] 0 | [symbol] SGRDYVSQFEGS |
| | | | | | | ALGK |
| 2202.1189 | 2202.0879 | −.031 | 14 | [symbol] 0 | [symbol] 7 | [symbol] REQLGPVTQEFW |
| | | | | | | DNLE [symbol] |

| | |
|---|---|
| unnamed protein product [Homo sapiens] | gi\|215415656 |

[symbol]

indicates data missing or illegible when filed

[0396] Peptide Information

| | | | | Start | | |
|---|---|---|---|---|---|---|
| Calc. Mass | Obsrv. Mass | ±da | ±ppm | Seq. | End Seq. | Sequence |
| 831.4359 | 831.4695 | .0336 | 40 | 189 | 195 | LAEYHAK |
| 869.5203 | 869.5491 | .0288 | 33 | 117 | 123 | QKVEPLR |
| 873.4424 | 873.4709 | .0285 | 33 | 124 | 131 | AELQEGAR |
| 1012.5786 | 1012.6014 | .0228 | 23 | 207 | 215 | AKPALEDLR |
| 1012.5786 | 1012.6014 | .0228 | 23 | 207 | 215 | AKPALEDLR |
| 1226.5437 | 1226.5634 | .0197 | 16 | 1 | 10 | DEPPQSPWDR |
| 1226.5437 | 1226.5634 | .0197 | 16 | 1 | 10 | DEPPQSP |
| | | | | | | WDR |
| 1252.6208 | 1252.6487 | .0279 | 22 | 97 | 106 | VQPYLDD |
| | | | | | | FQK |
| 1283.6273 | 1283.6271 | −.0002 | 0 | 150 | 160 | DCARAHV |
| | | | | | | DALR |
| 1301.6484 | 1301.66 | .0116 | 9 | 161 | 171 | THLAPYS |
| | | | | | | DELR |
| 1301.6484 | 1301.66 | .0116 | 9 | 161 | 171 | THLAPYS |
| | | | | | | DELR |
| 1323.621 | 1323.6156 | −.0054 | −4 | 78 | 88 | ETEGLRQ |
| | | | | | | EMSK |
| 1380.7158 | 1380.7303 | .0145 | 11 | 97 | 107 | VQPYLDDFQKK |
| 1386.7152 | 1386.7365 | .0213 | 15 | 227 | 238 | VSFLSALEEYTK |
| 1400.6693 | 1400.715 | .0457 | 33 | 28 | 40 | DYVSQFEGSAL |
| | | | | | | GK |
| 1411.6675 | 1411.6667 | −.0008 | −1 | 107 | 116 | KWQEEMELYR |
| 1453.707 | 1453.7174 | .0104 | 7 | 1 | 12 | DEPPQSPWDR |
| | | | | | | VK |
| 1467.7914 | 1467.7849 | −.0065 | −4 | 119 | 131 | VEPLRAELQEG |
| | | | | | | AR |
| 1467.7914 | 1467.7849 | −.0065 | −4 | 119 | 131 | VEPLRAELQEG |
| | | | | | | AR |
| 1612.7854 | 1612.8048 | .0194 | 12 | 46 | 59 | LLDNWDSVTST |
| | | | | | | FSK |
| 1650.8698 | 1650.8733 | .0035 | 2 | 13 | 27 | DLATVYVDVLK |
| | | | | | | DSGR |
| 1815.8508 | 1815.8446 | −.0062 | −3 | 24 | 40 | DSGRDYVSQF |
| | | | | | | EGSALGK |
| 1815.8508 | 1815.8446 | −.0062 | −3 | 24 | 40 | DSGRDYVSQF |
| | | | | | | EGSALGK |
| 2202.1189 | 2202.0879 | −.031 | −14 | 60 | 77 | LREQLGPVTQE |
| | | | | | | FWDNLEK |

| | |
|---|---|
| proapo-A-I protein [Homo sapiens] | gi\|178777 |

[0397] Peptide Information

| | | | | Start | | |
|---|---|---|---|---|---|---|
| Calc. Mass | Obsrv. Mass | ±da | ±ppm | Seq. | End Seq. | Sequence |
| 831.4359 | 831.4695 | .0336 | 40 | 213 | 219 | LAEYHAK |
| 873.4424 | 873.4709 | .0285 | 33 | 148 | 155 | AELQEGAR |
| 1008.5697 | 1008.5928 | .0231 | 23 | 176 | 184 | ARAHVDALR |
| 1012.5786 | 1012.6014 | .0228 | 23 | 231 | 239 | AKPALEDLR |
| 1012.5786 | 1012.6014 | .0228 | 23 | 231 | 239 | AKPALEDLR |
| 1252.6208 | 1252.6487 | .0279 | 22 | 121 | 130 | VQPYLDDFQK |
| 1283.5725 | 1283.6271 | .0546 | 43 | 132 | 140 | WQEEMELYR |
| 1301.6484 | 1301.66 | .0116 | 9 | 185 | 195 | THLAPYSDELR |
| 1301.6484 | 1301.66 | .0116 | 9 | 185 | 195 | THLAPYSDELR |
| 1318.642 | 1318.6689 | .0269 | 20 | 165 | 175 | LSPLGEEMRDR |
| 1323.621 | 1323.6156 | −.0054 | −4 | 102 | 112 | ETEGLRQEMSK |
| 1380.7158 | 1380.7303 | .0145 | 11 | 121 | 131 | VQPYLDDFQKK |
| 1386.7152 | 1386.7365 | .0213 | 15 | 251 | 262 | VSFLSALEEYTK |
| 1400.6693 | 1400.715 | .0457 | 33 | 52 | 64 | DYVSQFEGSALGK |
| 1411.6675 | 1411.6667 | −.0008 | −1 | 131 | 140 | KWQEEMELYR |
| 1453.7758 | 1453.7174 | −.0584 | −40 | 143 | 155 | VDPLRAELQEGAR |
| 1585.8081 | 1585.8174 | .0093 | 6 | 185 | 197 | THLAPYSDELRQR |
| 1585.8081 | 1585.8174 | .0093 | 6 | 185 | 197 | THLAPYSDELRQR |
| 1612.7854 | 1612.8048 | .0194 | 12 | 70 | 83 | LLDNWDSVTSTF |
| | | | | | | SK |
| 1650.8698 | 1650.8733 | .0035 | 2 | 37 | 51 | DLATVYVDVLKD |
| | | | | | | SGR |
| | 1650.8733 | | | | | |
| 1815.8508 | 1815.8446 | −.0062 | −3 | 48 | 64 | DSGRDYVSQF |
| | | | | | | EGSALGK |
| 1815.8508 | 1815.8446 | −.0062 | −3 | 48 | 64 | DSGRDYVSQF |
| | | | | | | EGSALGK |
| 2202.1189 | 2202.0879 | −.031 | −14 | 84 | 101 | LREQLGPVTQE |
| | | | | | | FWDNLE K |

| | |
|---|---|
| unnamed protein product [Homo sapiens] | gi\|215415642 |

[0398] Peptide Information

| | | | | Start | | |
|---|---|---|---|---|---|---|
| Calc. Mass | Obsrv. Mass | ±da | ±ppm | Seq. | End Seq. | Sequence |
| 831.4359 | 831.4695 | .0336 | 40 | 189 | 195 | LAEYHAK |
| 869.5203 | 869.5491 | .0288 | 33 | 117 | 123 | QKVEPLR |
| 873.4424 | 873.4709 | .0285 | 33 | 124 | 131 | AELQEGAR |
| 1008.5697 | 1008.5928 | .0231 | 23 | 152 | 160 | ARAHVDALR |
| 1252.6208 | 1252.6487 | .0279 | 22 | 97 | 106 | VQPYLDDFQK |
| 1283.5725 | 1283.6271 | .0546 | 43 | 108 | 116 | WQEEMELYR |
| 1301.6484 | 1301.66 | .0116 | 9 | 161 | 171 | THLAPYSDELR |
| 1301.6484 | 1301.66 | .0116 | 9 | 161 | 171 | THLAPYSDELR |
| 1318.642 | 1318.6689 | .0269 | 20 | 141 | 151 | LSPLGEEMRDR |
| 1323.621 | 1323.6156 | −.0054 | −4 | 78 | 88 | ETEGLRQEMSK |
| 1380.7158 | 1380.7303 | .0145 | 11 | 97 | 107 | VQPYLDDFQKK |
| 1386.7152 | 1386.7365 | .0213 | 15 | 227 | 238 | VSFLSALEEYTK |
| 1400.6693 | 1400.715 | .0457 | 33 | 28 | 40 | DYVSQFEGSALGK |
| 1411.6675 | 1411.6667 | −.0008 | −1 | 107 | 116 | KWQEEMELYR |
| 1467.7914 | 1467.7849 | −.0065 | −4 | 119 | 131 | VEPLRAELQEGAR |
| 1467.7914 | 1467.7849 | −.0065 | −4 | 119 | 131 | VEPLRAELQEGAR |
| 1585.8081 | 1585.8174 | .0093 | 6 | 161 | 173 | THLAPYSDELRQR |
| 1585.8081 | 1585.8174 | .0093 | 6 | 161 | 173 | THLAPYSDELRQR |
| 1612.7854 | 1612.8048 | .0194 | 12 | 46 | 59 | LLDNWDSVTSTF |
| | | | | | | SK |
| 1650.8698 | 1650.8733 | .0035 | 2 | 13 | 27 | DLATVYVDVLKD |
| | | | | | | SGR |
| 1815.8508 | 1815.8446 | −.0062 | −3 | 24 | 40 | DSGRDYVSQFE |
| | | | | | | GSALGK |
| 1815.8508 | 1815.8446 | −.0062 | −3 | 24 | 40 | DSGRDYVSQFE |
| | | | | | | GSALGK |
| 2202.1189 | 2202.0879 | −.031 | −14 | 60 | 77 | LREQLGPVTQEF |
| | | | | | | WDNLE |

[0399] Peptide Information

| | | | |
|---|---|---|---|
| | 63/C12 | | Instr./Gel |
| | | | Origin |
| | [1] Sample Project | | Instrument |
| | 20110503 | | Sample |
| | | | Name |
| Protein Name- | KH12 (SEQ ID NO. KH12) | Accession No. | |

| | |
|---|---|
| unnamed protein product [Homo sapiens] | gi\|189066554 |

[0400] Peptide Information

| | Obsrv. | | | Start | | |
|---|---|---|---|---|---|---|
| Calc. Mass | Mass | ±da | ±ppm | Seq. | End Seq. | Sequence |
| 836.4009 | 836.415 | .0141 | 17 | 218 | 224 | GQQYQGR |
| 836.4009 | 836.415 | .0141 | 17 | 218 | 224 | GQQYQGR |
| 874.4781 | 874.4888 | .0107 | 12 | 501 | 508 | VTGWGNLK |
| 951.4894 | 951.5774 | .088 | 92 | 434 | 440 | YERNIEK |
| 971.425 | 971.4321 | .0071 | 7 | 87 | 94 | YTACETAR |
| 1148.5518 | 1148.5477 | −.0041 | −4 | 125 | 133 | SGIECQLWR |
| 1148.5518 | 1148.5477 | −.0041 | −4 | 125 | 133 | SGIECQLWR |
| 1189.579 | 1189.5732 | −.0058 | −5 | 600 | 608 | YGFYTHVFR |
| 1194.6001 | 1194.5807 | −.0194 | −16 | 354 | 363 | ELLESYIDGR |
| 1194.6001 | 1194.5807 | −.0194 | −16 | 354 | 363 | ELLESYIDGR |
| 1265.6022 | 1265.592 | −.0102 | −8 | 453 | 461 | YNWRENLDR |
| 1489.7223 | 1489.7014 | −.0209 | −14 | 597 | 608 | DGKYGFYTHVFR |
| 1542.62 | 1542.6259 | .0059 | 4 | 561 | 575 | GDACEGDSGG |
| | | | | | | PFVMK |
| 1561.7281 | 1561.6975 | −.0306 | −20 | 315 | 327 | TATSEYQTFFN |
| | | | | | | PR |
| 1561.7281 | 1561.6975 | −.0306 | −20 | 315 | 327 | TATSEYQTFFN |
| | | | | | | PR |
| 1645.8214 | 1645.7874 | −.034 | −21 | 385 | 399 | SPQELLCGASL |
| | | | | | | ISDR |
| 1698.7211 | 1698.6948 | −.0263 | −15 | 560 | 575 | RGDACEGDSG |
| | | | | | | GPFVMK |
| 1773.9164 | 1773.8727 | −.0437 | −25 | 384 | 399 | KSPQELLCGA |
| | | | | | | SLISDR |
| 1883.8956 | 1883.8428 | −.0528 | −28 | 328 | 344 | TFGSGEADCG |
| | | | | | | LRPLFEK |
| 1883.8956 | 1883.8428 | −.0528 | −28 | 328 | 344 | TFGSGEADCG |
| | | | | | | LRPLFEK |
| 1963.908 | 1963.848 | −.06 | −31 | 248 | 263 | HQDFNSAVQL |
| | | | | | | VENFCR |
| 1968.8903 | 1968.8427 | −.0476 | −24 | 100 | 117 | LAACLEGNCA |
| | | | | | | EGLGTNYR |
| 2001.9158 | 2001.8715 | −.0443 | −22 | 544 | 560 | ITDNMFCAGYK |
| | | | | | | PDEGKR |
| 2011.9906 | 2011.9392 | −.0514 | −26 | 328 | 345 | TFGSGEADCGL |
| | | | | | | RPLFEK K |
| 2017.9106 | 2017.8978 | −.0128 | −6 | 544 | 560 | ITDNMFCAGYK |
| | | | | | | PDEGKR |
| 2070.9761 | 2070.9165 | −.0596 | −29 | 199 | 217 | SEGSSVNLSPP |
| | | | | | | LEQCVP |
| | | | | | | DR |
| 2200.9275 | 2200.9404 | .0129 | 6 | 159 | 177 | NPDSSTMGPW |
| | | | | | | CYTTDPT |
| | | | | | | VR |
| 2212.0122 | 2212.0205 | .0083 | 4 | 98 | 117 | DKLAACLEGNC |
| | | | | | | AEGLGT |
| | | | | | | NYR |
| 2212.0122 | 2212.0205 | .0083 | 4 | 98 | 117 | DKLAACLEGNC |
| | | | | | | AEGLGT |
| | | | | | | NYR |
| 2232.2534 | 2232.1794 | −.074 | −33 | 518 | 537 | GQPSVLQVVNL |
| | | | | | | PIVERPV |
| | | | | | | CK |
| 2232.2534 | 2232.1794 | −.074 | −33 | 518 | 537 | GQPSVLQVVNL |
| | | | | | | PIVERPV |
| | | | | | | CK |
| 2281.0991 | 2281.072 | −.0271 | −12 | 364 | 383 | IVEGSDAEIGM |
| | | | | | | SPWQVM |
| | | | | | | LFR |
| 2292.0417 | 2292.0005 | −.0412 | −18 | 179 | 198 | QECSIPVCGQD |
| | | | | | | QVTVAM |
| | | | | | | TPR |
| 2448.1428 | 2448.1128 | −.03 | −12 | 178 | 198 | RQECSIPVCGQ |
| | | | | | | DQVTVA MTPR |
| 2888.3591 | 2888.29 | −.0691 | −24 | 199 | 224 | SEGSSVNLSP |
| | | | | | | PLEQCVP |
| | | | | | | DRGQQYQGR |
| 2888.3591 | 2888.29 | −.0691 | −24 | 199 | 224 | SEGSSVNLSP |
| | | | | | | PLEQCVP |
| | | | | | | DRGQQYQGR |

| | |
|---|---|
| unnamed protein product [Homo sapiens] | gi\|194383496 |

[0401] Protein Group

| | Obsrv. | | | Start | End | |
|---|---|---|---|---|---|---|
| Calc. Mass | Mass | ±da | ±ppm | Seq. | Seq. | Sequence |
| 836.4009 | 836.415 | .0141 | 17 | 201 | 207 | GQQYQGR |
| 836.4009 | 836.415 | .0141 | 17 | 201 | 207 | GQQYQGR |
| 874.4781 | 874.4888 | .0107 | 12 | 484 | 491 | VTGWGNLK |
| 951.4894 | 951.5774 | .088 | 92 | 417 | 423 | YERNIEK |
| 971.425 | 971.4321 | .0071 | 7 | 70 | 77 | YTACETAR |
| 1148.5518 | 1148.5477 | −.0041 | −4 | 108 | 116 | SGIECQLWR |
| 1148.5518 | 1148.5477 | −.0041 | −4 | 108 | 116 | SGIECQLWR |
| 1189.579 | 1189.5732 | −.0058 | −5 | 583 | 591 | YGFYTHVFR |
| 1194.6001 | 1194.5807 | −.0194 | −16 | 337 | 346 | ELLESYIDGR |
| 1194.6001 | 1194.5807 | −.0194 | −16 | 337 | 346 | ELLESYIDGR |
| 1265.6022 | 1265.592 | −.0102 | −8 | 436 | 444 | YNWRENLDR |
| 1489.7223 | 1489.7014 | −.0209 | −14 | 580 | 591 | DGKYGFYTHVFR |
| 1542.62 | 1542.6259 | .0059 | 4 | 544 | 558 | GDACEGDSGGPF |
| | | | | | | VMK |
| 1561.7281 | 1561.6975 | −.0306 | −20 | 298 | 310 | TATSEYQTFFNPR |
| 1561.7281 | 1561.6975 | −.0306 | −20 | 298 | 310 | TATSEYQTFFNPR |
| 1645.8214 | 1645.7874 | −.034 | −21 | 368 | 382 | SPQELLCGASLISDR |
| 1698.7211 | 1698.6948 | −.0263 | −15 | 543 | 558 | RGDACEGDSG |
| | | | | | | GPFVMK |
| 1773.9164 | 1773.8727 | −.0437 | −25 | 367 | 382 | KSPQELLCGAS |
| | | | | | | LISDR |
| 1883.8956 | 1883.8428 | −.0528 | −28 | 311 | 327 | TFGSGEADCG |
| | | | | | | LRPLFEK |
| 1883.8956 | 1883.8428 | −.0528 | −28 | 311 | 327 | TFGSGEADCG |
| | | | | | | LRPLFEK |
| 1963.908 | 1963.848 | −.06 | −31 | 231 | 246 | HQDFNSAVQL |
| | | | | | | VENFCR |
| 1968.8903 | 1968.8427 | −.0476 | −24 | 83 | 100 | LAACLEGNCAE |
| | | | | | | GLGTNYR |
| 2001.9158 | 2001.8715 | −.0443 | −22 | 527 | 543 | ITDNMFCAGYK |
| | | | | | | PDEGKR |
| 2011.9906 | 2011.9392 | −.0514 | −26 | 311 | 328 | TFGSGEADCG |
| | | | | | | LRPLFEKK |
| 2017.9106 | 2017.8978 | −.0128 | −6 | 527 | 543 | ITDNMFCAGYK |
| | | | | | | PDEGKR |
| 2070.9761 | 2070.9165 | −.0596 | −29 | 182 | 200 | SEGSSVNLSPP |
| | | | | | | LEQCVP |
| | | | | | | DR |
| 2212.0122 | 2212.0205 | .0083 | 4 | 81 | 100 | DKLAACLEGNC |
| | | | | | | AEGLGT |
| | | | | | | NYR |
| 2212.0122 | 2212.0205 | .0083 | 4 | 81 | 100 | DKLAACLEGNC |
| | | | | | | AEGLGT |
| | | | | | | NYR |
| 2232.2534 | 2232.1794 | −.074 | −33 | 501 | 520 | GQPSVLQVVNL |
| | | | | | | PIVERPV |
| | | | | | | CK |
| 2232.2534 | 2232.1794 | −.074 | −33 | 501 | 520 | GQPSVLQVVNL |
| | | | | | | PIVERPV CK |
| 2281.0991 | 2281.072 | −.0271 | −12 | 347 | 366 | IVEGSDAEIGM |
| | | | | | | SPWQVM |
| | | | | | | LFR |
| 2292.0417 | 2292.0005 | −.0412 | −18 | 162 | 181 | QECSIPVCGQD |
| | | | | | | QVTVAM |
| | | | | | | TPR |
| 2448.1428 | 2448.1128 | −.03 | −12 | 161 | 181 | RQECSIPVCGQ |
| | | | | | | DQVTVA |
| | | | | | | MTPR |
| 2888.3591 | 2888.29 | −.0691 | −24 | 182 | 207 | SEGSSVNLSPP |
| | | | | | | LEQCVP |
| | | | | | | DRGQQYQGR |
| 2888.3591 | 2888.29 | −.0691 | −24 | 182 | 207 | SEGSSVNLSPP |
| | | | | | | LEQCVP |
| | | | | | | DRGQQYQGR |

| | |
|---|---|
| unnamed protein product [Homo sapiens] | gi\|1335344 |
| coagulation factor II (thrombin), isoform CRA_a | gi\|119588383 |
| [Homo sapiens] | |

[0402] Peptide Information

| | Obsrv. | | | Start | End | |
|---|---|---|---|---|---|---|
| Calc. Mass | Mass | ±da | ±ppm | Seq. | Seq. | Sequence |
| 836.4009 | 836.415 | .0141 | 17 | 211 | 217 | GQQYQGR |
| 836.4009 | 836.415 | .0141 | 17 | 211 | 217 | GQQYQGR |
| 874.4781 | 874.4888 | .0107 | 12 | 494 | 501 | VTGWGNLK |
| | 874.4888 | | | | | |
| 951.4894 | 951.5774 | .088 | 92 | 427 | 433 | YERNIEK |
| 971.425 | 971.4321 | .0071 | 7 | 80 | 87 | YTACETAR |
| 1148.5518 | 1148.5477 | −.0041 | −4 | 118 | 126 | SGIECQLWR |
| 1148.5518 | 1148.5477 | −.0041 | −4 | 118 | 126 | SGIECQLWR |
| 1189.579 | 1189.5732 | −.0058 | −5 | 593 | 601 | YGFYTHVFR |
| 1194.6001 | 1194.5807 | −.0194 | −16 | 347 | 356 | ELLESYIDGR |
| 1194.6001 | 1194.5807 | −.0194 | −16 | 347 | 356 | ELLESYIDGR |
| 1265.6022 | 1265.592 | −.0102 | −8 | 446 | 454 | YNWRENLDR |
| 1489.7223 | 1489.7014 | −.0209 | −14 | 590 | 601 | DGKYGFYTHVFR |
| 1542.62 | 1542.6259 | .0059 | 4 | 554 | 568 | GDACEGDSGGPF |
| | | | | | | VMK |
| 1561.7281 | 1561.6975 | −.0306 | −20 | 308 | 320 | TATSEYQTFFNPR |
| 1561.7281 | 1561.6975 | −.0306 | −20 | 308 | 320 | TATSEYQTFFNPR |
| 1645.8214 | 1645.7874 | −.034 | −21 | 378 | 392 | SPQELLCGASLISDR |
| 1698.7211 | 1698.6948 | −.0263 | −15 | 553 | 568 | RGDACEGDSGGP |
| | | | | | | FVMK |
| 1773.9164 | 1773.8727 | −.0437 | −25 | 377 | 392 | KSPQELLCGASLIS |
| | | | | | | DR |
| 1883.8956 | 1883.8428 | −.0528 | −28 | 321 | 337 | TFGSGEADCGLRP |
| | | | | | | LFEK |
| 1883.8956 | 1883.8428 | −.0528 | −28 | 321 | 337 | TFGSGEADCGLRP |
| | | | | | | LFEK |
| 1963.908 | 1963.848 | −.06 | −31 | 241 | 256 | HQDFNSAVQLVEN |
| | | | | | | FCR |
| 1968.8903 | 1968.8427 | −.0476 | −24 | 93 | 110 | LAACLEGNCAEGL |
| | | | | | | GTNYR |
| 2001.9158 | 2001.8715 | −.0443 | −22 | 537 | 553 | ITDNMFCAGYK |
| | | | | | | PDEGKR |
| 2011.9906 | 2011.9392 | −.0514 | −26 | 321 | 338 | TFGSGEADCG |
| | | | | | | LRPLFEKK |
| 2017.9106 | 2017.8978 | −.0128 | −6 | 537 | 553 | ITDNMFCAGYK |
| | | | | | | PDEGKR |
| 2070.9761 | 2070.9165 | −.0596 | −29 | 192 | 210 | SEGSSVNLSPP |
| | | | | | | LEQCVP |
| | | | | | | DR |
| 2212.0122 | 2212.0205 | .0083 | 4 | 91 | 110 | DKLAACLEGNC |
| | | | | | | AEGLGT |
| | | | | | | NYR |
| 2212.0122 | 2212.0205 | .0083 | 4 | 91 | 110 | DKLAACLEGNC |
| | | | | | | AEGLGT |
| | | | | | | NYR |
| 2232.2534 | 2232.1794 | −.074 | −33 | 511 | 530 | GQPSVLQVVNL |
| | | | | | | PIVERPV |
| | | | | | | CK |
| 2232.2534 | 2232.1794 | −.074 | −33 | 511 | 530 | GQPSVLQVVNL |
| | | | | | | PIVERPV |
| | | | | | | CK |
| 2281.0991 | 2281.072 | −.0271 | −12 | 357 | 376 | IVEGSDAEIGM |
| | | | | | | SPWQVM |
| | | | | | | LFR |
| 2292.0417 | 2292.0005 | −.0412 | −18 | 172 | 191 | QECSIPVCGQD |
| | | | | | | QVTVAM |
| | | | | | | TPR |
| 2448.1428 | 2448.1128 | −.03 | −12 | 171 | 191 | RQECSIPVCGQ |
| | | | | | | DQVTVA |
| | | | | | | MTPR |
| 2888.3591 | 2888.29 | −.0691 | −24 | 192 | 217 | SEGSSVNLSPP |
| | | | | | | LEQCVP |
| | | | | | | DRGQQYQGR |
| 2888.3591 | 2888.29 | −.0691 | −24 | 192 | 217 | SEGSSVNLSPP |
| | | | | | | LEQCVP |
| | | | | | | DRGQQYQGR |

| | |
|---|---|
| prothrombin preproprotein [Homo sapiens] | gi\|4503635 |

[0403] Protein Group

| | |
|---|---|
| Coagulation factor II (thrombin) [Homo sapiens] | gi\|30802115 |
| RecName: Full = Prothrombin; AltName: | gi\|135807 |
| Full = Coagulation factor II; | |
| Contains: RecName: | |
| Full = Activation peptide fragment 1; | |
| Contains: RecName: | |
| Full = Activation peptide fragment 2; | |
| Contains: RecName: | |
| Full = Thrombin light chain; | |
| Contains: RecName: Full = Thrombin | |
| heavy chain; Flags: | |
| Precursor | |
| coagulation factor II (thrombin) [Homo sapiens] | gi\|18653448 |
| coagulation factor II (thrombin), isoform CRA_c | gi\|119588385 |
| [Homo sapiens] | |
| coagulation factor II precursor variant [Homo sapiens] | gi\|62897113 |
| prothrombin [Homo sapiens] | gi\|339641 |
| prothrombin | |
| [Homo | |
| sapiens] | |
| prothrombin [Homo sapiens] | gi\|67624831 |
| unnamed protein product [Homo sapiens] | gi\|110623182 |

[0404] Peptide Information

| | Obsrv. | | | Start | End | |
|---|---|---|---|---|---|---|
| Calc. Mass | Mass | ±da | ±ppm | Seq. | Seq. | Sequence |
| 836.4009 | 836.415 | .0141 | 17 | 218 | 224 | GQQYQGR |
| 836.4009 | 836.415 | .0141 | 17 | 218 | 224 | GQQYQGR |
| 874.4781 | 874.4888 | .0107 | 12 | 501 | 508 | VTGWGNLK |
| 951.4894 | 951.5774 | .088 | 92 | 434 | 440 | YERNIEK |
| 971.425 | 971.4321 | .0071 | 7 | 87 | 94 | YTACETAR |
| 1148.5518 | 1148.5477 | −.0041 | −4 | 125 | 133 | SGIECQLWR |
| 1148.5518 | 1148.5477 | −.0041 | −4 | 125 | 133 | SGIECQLWR |
| 1189.579 | 1189.5732 | −.0058 | −5 | 600 | 608 | YGFYTHVFR |
| 1194.6001 | 1194.5807 | −.0194 | −16 | 354 | 363 | ELLESYIDGR |
| 1194.6001 | 1194.5807 | −.0194 | −16 | 354 | 363 | ELLESYIDGR |
| 1265.6022 | 1265.592 | −.0102 | −8 | 453 | 461 | YNWRENLDR |
| 1489.7223 | 1489.7014 | −.0209 | −14 | 597 | 608 | DGKYGFYTHVFR |
| 1542.62 | 1542.6259 | .0059 | 4 | 561 | 575 | GDACEGDSGGPF |
| | | | | | | VMK |
| 1561.7281 | 1561.6975 | −.0306 | −20 | 315 | 327 | TATSEYQTFFNPR |
| 1561.7281 | 1561.6975 | −.0306 | −20 | 315 | 327 | TATSEYQTFFNPR |
| 1645.8214 | 1645.7874 | −.034 | −21 | 385 | 399 | SPQELLCGASLISDR |
| 1698.7211 | 1698.6948 | −.0263 | −15 | 560 | 575 | RGDACEGDSGGP |
| | | | | | | FVMK |
| 1773.9164 | 1773.8727 | −.0437 | −25 | 384 | 399 | KSPQELLCGA |
| | | | | | | SLISDR |
| 1883.8956 | 1883.8428 | −.0528 | −28 | 328 | 344 | TFGSGEADCG |
| | | | | | | LRPLFEK |
| 1883.8956 | 1883.8428 | −.0528 | −28 | 328 | 344 | TFGSGEADCG |
| | | | | | | LRPLFEK |
| 1963.908 | 1963.848 | −.06 | −31 | 248 | 263 | HQDFNSAVQL |
| | | | | | | VENFCR |
| 1968.8903 | 1968.8427 | −.0476 | −24 | 100 | 117 | LAACLEGNCA |
| | | | | | | EGLGTNYR |
| 2001.9158 | 2001.8715 | −.0443 | −22 | 544 | 560 | ITDNMFCAGYK |
| | | | | | | PDEGKR |
| 2011.9906 | 2011.9392 | −.0514 | −26 | 328 | 345 | TFGSGEADCG |
| | | | | | | LRPLFEKK |
| 2017.9106 | 2017.8978 | −.0128 | −6 | 544 | 560 | ITDNMFCAGYK |
| | | | | | | PDEGKR |
| 2070.9761 | 2070.9165 | −.0596 | −29 | 199 | 217 | SEGSSVNLSPP |
| | | | | | | LEQCVP |
| | | | | | | DR |
| 2212.0122 | 2212.0205 | .0083 | 4 | 98 | 117 | DKLAACLEGNC |
| | | | | | | AEGLGT |
| | | | | | | NYR |
| 2212.0122 | 2212.0205 | .0083 | 4 | 98 | 117 | DKLAACLEGNC |
| | | | | | | AEGLGT |
| | | | | | | NYR |
| 2232.2534 | 2232.1794 | −.074 | −33 | 518 | 537 | GQPSVLQVVNL |
| | | | | | | PIVERPV |
| | | | | | | CK |
| 2232.2534 | 2232.1794 | −.074 | −33 | 518 | 537 | GQPSVLQVVNL |
| | | | | | | PIVERPV |
| | | | | | | CK |
| 2281.0991 | 2281.072 | −.0271 | −12 | 364 | 383 | IVEGSDAEIGM |
| | | | | | | SPWQVM |
| | | | | | | LFR |
| 2292.0417 | 2292.0005 | −.0412 | −18 | 179 | 198 | QECSIPVCGQD |
| | | | | | | QVTVAM |
| | | | | | | TPR |
| 2448.1428 | 2448.1128 | −.03 | −12 | 178 | 198 | RQECSIPVCGQ |
| | | | | | | DQVTVA |
| | | | | | | MTPR |
| 2888.3591 | 2888.29 | −.0691 | −24 | 199 | 224 | SEGSSVNLSPP |
| | | | | | | LEQCVP |
| | | | | | | DRGQQYQGR |
| 2888.3591 | 2888.29 | −.0691 | −24 | 199 | 224 | SEGSSVNLSPP |
| | | | | | | LEQCVP |
| | | | | | | DRGQQYQGR |

| | |
|---|---|
| coagulation factor II precursor variant | gi\|62897109 |
| [Homo sapiens] | |

[0405] Peptide Information

| | | | | Start | | |
|---|---|---|---|---|---|---|
| Calc. Mass | Obsrv. Mass | ±da | ±ppm | Seq. | End Seq. | Sequence |
| 836.4009 | 836.415 | .0141 | 17 | 218 | 224 | GQQYQGR |
| 836.4009 | 836.415 | .0141 | 17 | 218 | 224 | GQQYQGR |
| 874.4781 | 874.4888 | .0107 | 12 | 501 | 508 | VTGWGNLK |
| 951.4894 | 951.5774 | .088 | 92 | 434 | 440 | YERNIEK |
| 971.425 | 971.4321 | .0071 | 7 | 87 | 94 | YTACETAR |
| 1148.5518 | 1148.5477 | −.0041 | −4 | 125 | 133 | SGIECQLWR |
| 1148.5518 | 1148.5477 | −.0041 | −4 | 125 | 133 | SGIECQLWR |
| 1189.579 | 1189.5732 | −.0058 | −5 | 600 | 608 | YGFYTHVFR |
| 1194.6001 | 1194.5807 | −.0194 | −16 | 354 | 363 | ELLESYIDGR |
| 1194.6001 | 1194.5807 | −.0194 | −16 | 354 | 363 | ELLESYIDGR |
| 1265.6022 | 1265.592 | −.0102 | −8 | 453 | 461 | YNWRENLDR |
| 1489.7223 | 1489.7014 | −.0209 | −14 | 597 | 608 | DGKYGFYTH |
| | | | | | | VFR |
| 1542.62 | 1542.6259 | .0059 | 4 | 561 | 575 | GDACEGDSG |
| | | | | | | GPFVMK |
| 1561.7281 | 1561.6975 | −.0306 | −20 | 315 | 327 | TATSEYQTFF |
| | | | | | | NPR |
| 1561.7281 | 1561.6975 | −.0306 | −20 | 315 | 327 | TATSEYQTFF |
| | | | | | | NPR |
| 1645.8214 | 1645.7874 | −.034 | −21 | 385 | 399 | SPQELLCGASL |
| | | | | | | ISDR |
| 1698.7211 | 1698.6948 | −.0263 | −15 | 560 | 575 | RGDACEGDSG |
| | | | | | | GPFVMK |
| 1773.9164 | 1773.8727 | −.0437 | −25 | 384 | 399 | KSPQELLCGAS |
| | | | | | | LISDR |
| 1963.908 | 1963.848 | −.06 | −31 | 248 | 263 | HQDFNSAVQL |
| | | | | | | VENFCR |
| 1968.8903 | 1968.8427 | −.0476 | −24 | 100 | 117 | LAACLEGNCAE |
| | | | | | | GLGTNYR |
| 2001.9158 | 2001.8715 | −.0443 | −22 | 544 | 560 | ITDNMFCAGYK |
| | | | | | | PDEGKR |
| 2017.9106 | 2017.8978 | −.0128 | −6 | 544 | 560 | ITDNMFCAGYK |
| | | | | | | PDEGKR |
| 2070.9761 | 2070.9165 | −.0596 | −29 | 199 | 217 | SEGSSVNLSPP |
| | | | | | | LEQCVP |
| | | | | | | DR |
| 2212.0122 | 2212.0205 | .0083 | 4 | 98 | 117 | DKLAACLEGNC |
| | | | | | | AEGLGT |
| | | | | | | NYR |
| 2212.0122 | 2212.0205 | .0083 | 4 | 98 | 117 | DKLAACLEGNC |
| | | | | | | AEGLGT |
| | | | | | | NYR |
| 2232.2534 | 2232.1794 | −.074 | −33 | 518 | 537 | GQPSVLQVVNL |
| | | | | | | PIVERPV |
| | | | | | | CK |
| 2232.2534 | 2232.1794 | −.074 | −33 | 518 | 537 | GQPSVLQVVNL |
| | | | | | | PIVERPV |
| | | | | | | CK |
| 2281.0991 | 2281.072 | −.0271 | −12 | 364 | 383 | IVEGSDAEIGM |
| | | | | | | SPWQVM |
| | | | | | | LFR |
| 2292.0417 | 2292.0005 | −.0412 | −18 | 179 | 198 | QECSIPVCGQD |
| | | | | | | QVTVAM |
| | | | | | | TPR |
| 2448.1428 | 2448.1128 | −.03 | −12 | 178 | 198 | RQECSIPVCGQ |
| | | | | | | DQVTVA |
| | | | | | | MTPR |
| 2888.3591 | 2888.29 | −.0691 | −24 | 199 | 224 | SEGSSVNLSPP |
| | | | | | | LEQCVP |
| | | | | | | DRGQQYQGR |
| 2888.3591 | 2888.29 | −.0691 | −24 | 199 | 224 | SEGSSVNLSPP |
| | | | | | | LEQCVP |
| | | | | | | DRGQQYQGR |

| | |
|---|---|
| coagulation factor II (thrombin), isoform CRA_b | gi\|119588384 |
| [Homo sapiens] | |

[0406] Peptide Information

| | | | | Start | | |
|---|---|---|---|---|---|---|
| Calc. Mass | Obsrv. Mass | ±da | ±ppm | Seq. | End Seq. | Sequence |
| 836.4009 | 836.415 | .0141 | 17 | 218 | 224 | GQQYQGR |
| 836.4009 | 836.415 | .0141 | 17 | 218 | 224 | GQQYQGR |
| 874.4781 | 874.4888 | .0107 | 12 | 501 | 508 | VTGWGNLK |
| 951.4894 | 951.5774 | .088 | 92 | 434 | 440 | YERNIEK |
| 971.425 | 971.4321 | .0071 | 7 | 87 | 94 | YTACETAR |
| 1148.5518 | 1148.5477 | −.0041 | −4 | 125 | 133 | SGIECQLWR |
| 1148.5518 | 1148.5477 | −.0041 | −4 | 125 | 133 | SGIECQLWR |
| 1194.6001 | 1194.5807 | −.0194 | −16 | 354 | 363 | ELLESYIDGR |
| | 1194.5807 | | | | | |
| 1194.6001 | 1194.5807 | −.0194 | −16 | 354 | 363 | ELLESYIDGR |
| 1265.6022 | 1265.592 | −.0102 | −8 | 453 | 461 | YNWRENLDR |
| 1561.7281 | 1561.6975 | −.0306 | −20 | 315 | 327 | TATSEYQTFFN |
| | | | | | | PR |
| 1561.7281 | 1561.6975 | −.0306 | −20 | 315 | 327 | TATSEYQTFFN |
| | | | | | | PR |
| 1645.8214 | 1645.7874 | −.034 | −21 | 385 | 399 | SPQELLCGASL |
| | | | | | | ISDR |
| 1773.9164 | 1773.8727 | −.0437 | −25 | 384 | 399 | KSPQELLCGAS |
| | | | | | | LISDR |
| 1883.8956 | 1883.8428 | −.0528 | −28 | 328 | 344 | TFGSGEADCG |
| | | | | | | LRPLFEK |
| 1883.8956 | 1883.8428 | −.0528 | −28 | 328 | 344 | TFGSGEADCG |
| | | | | | | LRPLFEK |
| 1963.908 | 1963.848 | −.06 | −31 | 248 | 263 | HQDFNSAVQL |
| | | | | | | VENFCR |
| 1968.8903 | 1968.8427 | −.0476 | −24 | 100 | 117 | LAACLEGNCAE |
| | | | | | | GLGTNYR |
| 2011.9906 | 2011.9392 | −.0514 | −26 | 328 | 345 | TFGSGEADCG |
| | | | | | | LRPLFEKK |
| 2070.9761 | 2070.9165 | −.0596 | −29 | 199 | 217 | SEGSSVNLSPP |
| | | | | | | LEQCVP |
| | | | | | | DR |
| 2212.0122 | 2212.0205 | .0083 | 4 | 98 | 117 | DKLAACLEGNC |
| | | | | | | AEGLGT |
| | | | | | | NYR |
| 2212.0122 | 2212.0205 | .0083 | 4 | 98 | 117 | DKLAACLEGNC |
| | | | | | | AEGLGT |
| | | | | | | NYR |
| 2232.2534 | 2232.1794 | −.074 | −33 | 518 | 537 | GQPSVLQVVNL |
| | | | | | | PIVERPV |
| | | | | | | CK |
| 2232.2534 | 2232.1794 | −.074 | −33 | 518 | 537 | GQPSVLQVVNL |
| | | | | | | PIVERPV |
| | | | | | | CK |
| 2281.0991 | 2281.072 | −.0271 | −12 | 364 | 383 | IVEGSDAEIGM |
| | | | | | | SPWQVM |
| | | | | | | LFR |
| 2292.0417 | 2292.0005 | −.0412 | −18 | 179 | 198 | QECSIPVCGQD |
| | | | | | | QVTVAM |
| | | | | | | TPR |
| 2448.1428 | 2448.1128 | −.03 | −12 | 178 | 198 | RQECSIPVCGQ |
| | | | | | | DQVTVA |
| | | | | | | MTPR |
| 2888.3591 | 2888.29 | −.0691 | −24 | 199 | 224 | SEGSSVNLSPP |
| | | | | | | LEQCVP |
| | | | | | | DRGQQYQGR |
| 2888.3591 | 2888.29 | −.0691 | −24 | 199 | 224 | SEGSSVNLSPP |
| | | | | | | LEQCVP |
| | | | | | | DRGQQYQGR |

| | |
|---|---|
| unnamed protein product [Homo sapiens] | gi\|194373497 |

[0407] Peptide Information

| | Obsrv. | | | Start | | |
|---|---|---|---|---|---|---|
| Calc. Mass | Mass | ±da | ±ppm | Seq. | End Seq. | Sequence |
| 836.4009 | 836.415 | .0141 | 17 | 67 | 73 | GQQYQGR |
| 836.4009 | 836.415 | .0141 | 17 | 67 | 73 | GQQYQGR |
| 874.4781 | 874.4888 | .0107 | 12 | 350 | 357 | VTGWGNLK |
| 951.4894 | 951.5774 | .088 | 92 | 283 | 289 | YERNIEK |
| 1189.579 | 1189.5732 | −.0058 | −5 | 449 | 457 | YGFYTHVFR |
| 1194.6001 | 1194.5807 | −.0194 | −16 | 203 | 212 | ELLESYIDGR |
| 1194.6001 | 1194.5807 | −.0194 | −16 | 203 | 212 | ELLESYIDGR |
| 1265.6022 | 1265.592 | −.0102 | −8 | 302 | 310 | YNWRENLDR |
| | 1265.592 | | | | | |
| 1489.7223 | 1489.7014 | −.0209 | −14 | 446 | 457 | DGKYGFYTHVFR |
| 1542.62 | 1542.6259 | .0059 | 4 | 410 | 424 | GDACEGDSGG |
| | | | | | | PFVMK |
| 1561.7281 | 1561.6975 | −.0306 | −20 | 164 | 176 | TATSEYQTFFN |
| | | | | | | PR |
| 1561.7281 | 1561.6975 | −.0306 | −20 | 164 | 176 | TATSEYQTFFN |
| | | | | | | PR |
| 1645.8214 | 1645.7874 | −.034 | −21 | 234 | 248 | SPQELLCGASL |
| | | | | | | ISDR |
| 1698.7211 | 1698.6948 | −.0263 | −15 | 409 | 424 | RGDACEGDSG |
| | | | | | | GPFVMK |
| 1773.9164 | 1773.8727 | −.0437 | −25 | 233 | 248 | KSPQELLCGAS |
| | | | | | | LISDR |
| 1883.8956 | 1883.8428 | −.0528 | −28 | 177 | 193 | TFGSGEADCG |
| | | | | | | LRPLFEK |
| 1883.8956 | 1883.8428 | −.0528 | −28 | 177 | 193 | TFGSGEADCG |
| | | | | | | LRPLFEK |
| 1963.908 | 1963.848 | −.06 | −31 | 97 | 112 | HQDFNSAVQL |
| | | | | | | VENFCR |
| 2001.9158 | 2001.8715 | −.0443 | −22 | 393 | 409 | ITDNMFCAGYK |
| | | | | | | PDEGKR |
| 2011.9906 | 2011.9392 | −.0514 | −26 | 177 | 194 | TFGSGEADCG |
| | | | | | | LRPLFEKK |
| 2017.9106 | 2017.8978 | −.0128 | −6 | 393 | 409 | ITDNMFCAGYK |
| | | | | | | PDEGKR |
| 2070.9761 | 2070.9165 | −.0596 | −29 | 48 | 66 | SEGSSVNLSPP |
| | | | | | | LEQCVP |
| | | | | | | DR |
| 2232.2534 | 2232.1794 | −.074 | −33 | 367 | 386 | GQPSVLQVVNL |
| | | | | | | PIVERPV |
| | | | | | | CK |
| 2232.2534 | 2232.1794 | −.074 | −33 | 367 | 386 | GQPSVLQVVNL |
| | | | | | | PIVERPV |
| | | | | | | CK |
| 2281.0991 | 2281.072 | −.0271 | −12 | 213 | 232 | IVEGSDAEIGM |
| | | | | | | SPWQVM |
| | | | | | | LFR |
| 2292.0417 | 2292.0005 | −.0412 | −18 | 28 | 47 | QECSIPVCGQD |
| | | | | | | QVTVAM |
| | | | | | | TPR |
| 2448.1428 | 2448.1128 | −.03 | −12 | 27 | 47 | RQECSIPVCGQ |
| | | | | | | DQVTVA |
| | | | | | | MTPR |
| 2888.3591 | 2888.29 | −.0691 | −24 | 48 | 73 | SEGSSVNLSPP |
| | | | | | | LEQCVP |
| | | | | | | DRGQQYQGR |
| 2888.3591 | 2888.29 | −.0691 | −24 | 48 | 73 | SEGSSVNLSPP |
| | | | | | | LEQCVP |
| | | | | | | DRGQQYQGR |

| | |
|---|---|
| Chain B, Crystal Structure Of | gi\|307776409 |
| Prethombin-2FRAGMENT-2 Complex | |

[0408] Peptide Information

| | | | | Start | | |
|---|---|---|---|---|---|---|
| Calc. Mass | Obsrv. Mass | ±da | ±ppm | Seq. | End Seq. | Sequence |
| 874.4781 | 874.4888 | .0107 | 12 | 187 | 194 | VTGWGNLK |
| 951.4894 | 951.5774 | .088 | 92 | 120 | 126 | YERNIEK |
| 1189.579 | 1189.5732 | −.0058 | −5 | 286 | 294 | YGFYTHVFR |
| 1194.6001 | 1194.5807 | −.0194 | −16 | 40 | 49 | ELLESYIDGR |
| 1194.6001 | 1194.5807 | −.0194 | −16 | 40 | 49 | ELLESYIDGR |
| 1265.6022 | 1265.592 | −.0102 | −8 | 139 | 147 | YNWRENLDR |
| 1489.7223 | 1489.7014 | −.0209 | −14 | 283 | 294 | DGKYGFYTHVFR |
| 1561.7281 | 1561.6975 | −.0306 | −20 | 1 | 13 | TATSEYQTFFNPR |
| | 1561.6975 | | | | | |
| 1561.7281 | 1561.6975 | −.0306 | −20 | 1 | 13 | TATSEYQTFFN |
| | | | | | | PR |
| 1645.8214 | 1645.7874 | −.034 | −21 | 71 | 85 | SPQELLCGASL |
| | | | | | | ISDR |
| 1773.9164 | 1773.8727 | −.0437 | −25 | 70 | 85 | KSPQELLCGAS |
| | | | | | | LISDR |
| 1883.8956 | 1883.8428 | −.0528 | −28 | 14 | 30 | TFGSGEADCG |
| | | | | | | LRPLFEK |
| 1883.8956 | 1883.8428 | −.0528 | −28 | 14 | 30 | TFGSGEADCG |
| | | | | | | LRPLFEK |
| 2001.9158 | 2001.8715 | −.0443 | −22 | 230 | 246 | ITDNMFCAGYK |
| | | | | | | PDEGKR |
| 2011.9906 | 2011.9392 | −.0514 | −26 | 14 | 31 | TFGSGEADCG |
| | | | | | | LRPLFEKK |
| 2017.9106 | 2017.8978 | −.0128 | −6 | 230 | 246 | ITDNMFCAGYK |
| | | | | | | PDEGKR |
| 2225.9702 | 2225.9805 | .0103 | 5 | 247 | 267 | GDACEGDAGG |
| | | | | | | PFVMKS |
| | | | | | | PFNNR |
| 2232.2534 | 2232.1794 | −.074 | −33 | 204 | 223 | GQPSVLQVVNL |
| | | | | | | PIVERPV |
| | | | | | | CK |
| 2232.2534 | 2232.1794 | −.074 | −33 | 204 | 223 | GQPSVLQVVNL |
| | | | | | | PIVERPV |
| | | | | | | CK |
| 2281.0991 | 2281.072 | −.0271 | −12 | 50 | 69 | IVEGSDAEIGM |
| | | | | | | SPWQVM |
| | | | | | | LFR |

| | |
|---|---|
| Chain L, Crystal Structure Of Human Meizothrombin | gi\|213424252 |
| Desf1 | |

[0409] Peptide Information

| | Obsrv. | | | Start | | |
|---|---|---|---|---|---|---|
| Calc. Mass | Mass | ±da | ±ppm | Seq. | End Seq. | Sequence |
| 836.4009 | 836.415 | .0141 | 17 | 13 | 19 | GQQYQGR |
| 836.4009 | 836.415 | .0141 | 17 | 13 | 19 | GQQYQGR |
| 1194.6001 | 1194.5807 | −.0194 | −16 | 149 | 158 | ELLESYIDGR |
| 1194.6001 | 1194.5807 | −.0194 | −16 | 149 | 158 | ELLESYIDGR |
| 1561.7281 | 1561.6975 | −.0306 | −20 | 110 | 122 | TATSEYQTFFNPR |
| 1561.7281 | 1561.6975 | −.0306 | −20 | 110 | 122 | TATSEYQTFFNPR |
| 1883.8956 | 1883.8428 | −.0528 | −28 | 123 | 139 | TFGSGEADCGLRP |
| | | | | | | LFEK |
| 1883.8956 | 1883.8428 | −.0528 | −28 | 123 | 139 | TFGSGEADCGLRP |
| | | | | | | LFEK |
| 1963.908 | 1963.848 | −.06 | −31 | 43 | 58 | HQDFNSAVQLVEN |
| | | | | | | FCR |
| 2011.9906 | 2011.9392 | −.0514 | −26 | 123 | 140 | TFGSGEADCGLRP |
| | | | | | | LFEKK |

| | |
|---|---|
| Chain A, Crystal Structure Of Human | gi\|311772208 |
| Prethrombin-1 | |

[0410] Peptide Information

| | | | | Start | | |
|---|---|---|---|---|---|---|
| Calc. Mass | Obsrv. Mass | ±da | ±ppm | Seq. | End Seq. | Sequence |
| 836.4009 | 836.415 | .0141 | 17 | 20 | 26 | GQQYQGR |
| 836.4009 | 836.415 | .0141 | 17 | 20 | 26 | GQQYQGR |
| 874.4781 | 874.4888 | .0107 | 12 | 303 | 310 | VTGWGNLK |
| | 874.4888 | | | | | |
| 951.4894 | 951.5774 | .088 | 92 | 236 | 242 | YERNIEK |
| 1189.579 | 1189.5732 | −.0058 | −5 | 402 | 410 | YGFYTH |
| | | | | | | VFR |
| 1194.6001 | 1194.5807 | −.0194 | −16 | 156 | 165 | ELLESYI |
| | | | | | | DGR |
| 1194.6001 | 1194.5807 | −.0194 | −16 | 156 | 165 | ELLESYIDGR |
| 1265.6022 | 1265.592 | −.0102 | −8 | 255 | 263 | YNWRENLDR |
| 1489.7223 | 1489.7014 | −.0209 | −14 | 399 | 410 | DGKYGFYTHVFR |
| 1542.62 | 1542.6259 | .0059 | 4 | 363 | 377 | GDACEGDSGG |
| | | | | | | PFVMK |
| 1645.8214 | 1645.7874 | −.034 | −21 | 187 | 201 | SPQELLCGASL |
| | | | | | | ISDR |
| 1698.7211 | 1698.6948 | −.0263 | −15 | 362 | 377 | RGDACEGDSG |
| | | | | | | GPFVMK |
| 1773.9164 | 1773.8727 | −.0437 | −25 | 186 | 201 | KSPQELLCGAS |
| | | | | | | LISDR |
| 1963.908 | 1963.848 | −.06 | −31 | 50 | 65 | HQDFNSAVQL |
| | | | | | | VENFCR |
| 2001.9158 | 2001.8715 | −.0443 | −22 | 346 | 362 | ITDNMFCAGYK |
| | | | | | | PDEGKR |
| 2017.9106 | 2017.8978 | −.0128 | −6 | 346 | 362 | ITDNMFCAGYK |
| | | | | | | PDEGKR |
| 2070.9761 | 2070.9165 | −.0596 | −29 | 1 | 19 | SEGSSVNLSPP |
| | | | | | | LEQCVP |
| | | | | | | DR |
| 2232.2534 | 2232.1794 | −.074 | −33 | 320 | 339 | GQPSVLQVVNL |
| | | | | | | PIVERPV |
| | | | | | | CK |
| 2232.2534 | 2232.1794 | −.074 | −33 | 320 | 339 | GQPSVLQVVNL |
| | | | | | | PIVERPV |
| | | | | | | CK |
| 2281.0991 | 2281.072 | −.0271 | −12 | 166 | 185 | IVEGSDAEIGM |
| | | | | | | SPWQVM |
| | | | | | | LFR |
| 2888.3591 | 2888.29 | −.0691 | −24 | 1 | 26 | SEGSSVNLSPP |
| | | | | | | LEQCVP |
| | | | | | | DRGQQYQGR |
| 2888.3591 | 2888.29 | −.0691 | −24 | 1 | 26 | SEGSSVNLSPP |
| | | | | | | LEQCVP |
| | | | | | | DRGQQYQGR |

| | |
|---|---|
| Chain C, Crystal Structure Of Na-Free | gi\|256032634 |
| Thrombin In Complex With Thrombomodulin | |

[0411] Protein Group

| | |
|---|---|
| Chain A, 2.1 Angstrom Structure Of A Nonproductive | gi\|116666779 |
| Complex Between Antithrombin, Synthetic Heparin | |
| Mimetic Sr123781 And Two S195a Thrombin | |
| Molecules | |
| Chain A, Crystal Structure Of Na-Free Thrombin In | gi\|256032632 |
| Complex With Thrombomodulin | |
| Chain A, Crystal Structure Of Native S195a Thrombin | gi\|15825720 |
| With An Unoccupied Active Site | |
| Chain C, 2.1 Angstrom Structure Of A Nonproductive | gi\|116666781 |
| Complex Between Antithrombin, Synthetic Heparin | |
| Mimetic Sr123781 And Two S195a Thrombin | |
| Molecules | |
| Chain C, Crystal Structure Of Native S195a Thrombin | gi\|15825722 |
| With An Unoccupied Active Site | |
| Chain E, Crystal Structure Of Na-Free Thrombin In | gi\|256032636 |
| Complex With Thrombomodulin | |
| Chain E, Crystal Structure Of Native S195a Thrombin | gi\|15825724 |
| With An Unoccupied Active Site | |
| Chain L, 1.6 A Structure Of The Pci-Thrombin-Heparin | gi\|185177829 |
| Complex | |
| Chain L, 2.5a Crystal Structure Of The | gi\|52695709 |
| Antithrombin-Thrombin-Heparin Ternary Complex | |

[0412] Peptide Information

| | Obsrv. | | | Start | | |
|---|---|---|---|---|---|---|
| Calc. Mass | Mass | ±da | ±ppm | Seq. | End Seq. | Sequence |
| 1194.6001 | 1194.5807 | −.0194 | −16 | 40 | 49 | ELLESYIDGR |
| 1194.6001 | 1194.5807 | −.0194 | −16 | 40 | 49 | ELLESYIDGR |
| 1561.7281 | 1561.6975 | −.0306 | −20 | 1 | 13 | TATSEYQTFFNPR |
| 1561.7281 | 1561.6975 | −.0306 | −20 | 1 | 13 | TATSEYQTFFNPR |
| 1883.8956 | 1883.8428 | −.0528 | −28 | 14 | 30 | TFGSGEADCGLRP |
| | | | | | | LFEK |
| 1883.8956 | 1883.8428 | −.0528 | −28 | 14 | 30 | TFGSGEADCGLRP |
| | | | | | | LFEK |
| 2011.9906 | 2011.9392 | −.0514 | −26 | 14 | 31 | TFGSGEADCGLRP |
| | | | | | | LFEKK |

| | |
|---|---|
| Chain A, Nonbasic Thrombin | gi\|67464458 |
| Inhibitor Complex | |

[0413] Protein Group

| | |
|---|---|
| Chain A, Crystal Structure Of | gi\|11514051 |
| Human | |
| Alpha-ThrombinRwj-51438 | |
| Complex At 1.7 A | |
| Chain E, The Isomorphous | gi\|809450 |
| Structures Of | |
| Prethrombin2, | |
| Hirugen-And Ppack-Thrombin: | |
| Changes | |
| Accompanying | |
| Activation And Exosite Binding | |
| To | |
| Thrombin | gi\|38018090 |
| prothrombin | |
| [Homo | |
| sapiens] | |

[0414] Peptide Information

| | Obsrv. | | | Start | | |
|---|---|---|---|---|---|---|
| Calc. Mass | Mass | ±da | ±ppm | Seq. | End Seq. | Sequence |
| 874.4781 | 874.4888 | .0107 | 12 | 174 | 181 | VTGWGNLK |
| 951.4894 | 951.5774 | .088 | 92 | 107 | 113 | YERNIEK |
| 1189.579 | 1189.5732 | −.0058 | −5 | 273 | 281 | YGFYTHVFR |
| 1194.6001 | 1194.5807 | −.0194 | −16 | 27 | 36 | ELLESYIDGR |
| 1194.6001 | 1194.5807 | −.0194 | −16 | 27 | 36 | ELLESYIDGR |
| 1265.6022 | 1265.592 | −.0102 | −8 | 126 | 134 | YNWRENLDR |
| 1489.7223 | 1489.7014 | −.0209 | −14 | 270 | 281 | DGKYGFYTHVFR |
| 1542.62 | 1542.6259 | .0059 | 4 | 234 | 248 | GDACEGDSGG |
| | | | | | | PFVMK |
| 1645.8214 | 1645.7874 | −.034 | −21 | 58 | 72 | SPQELLCGASL |
| | | | | | | ISDR |
| 1698.7211 | 1698.6948 | −.0263 | −15 | 233 | 248 | RGDACEGDSG |
| | | | | | | GPFVMK |
| 1773.9164 | 1773.8727 | −.0437 | −25 | 57 | 72 | KSPQELLCGAS |
| | | | | | | LISDR |
| 1883.8956 | 1883.8428 | −.0528 | −28 | 1 | 17 | TFGSGEADCG |
| | | | | | | LRPLFEK |
| 1883.8956 | 1883.8428 | −.0528 | −28 | 1 | 17 | TFGSGEADCG |
| | | | | | | LRPLFEK |
| 2001.9158 | 2001.8715 | −.0443 | −22 | 217 | 233 | ITDNMFCAGYK |
| | | | | | | PDEGKR |
| 2011.9906 | 2011.9392 | −.0514 | −26 | 1 | 18 | TFGSGEADCG |
| | | | | | | LRPLFEKK |
| 2017.9106 | 2017.8978 | −.0128 | −6 | 217 | 233 | ITDNMFCAGYK |
| | | | | | | PDEGKR |
| 2232.2534 | 2232.1794 | −.074 | −33 | 191 | 210 | GQPSVLQVVNL |
| | | | | | | PIVERPV |
| | | | | | | CK |
| 2232.2534 | 2232.1794 | −.074 | −33 | 191 | 210 | GQPSVLQVVNL |
| | | | | | | PIVERPV |
| | | | | | | CK |
| 2281.0991 | 2281.072 | −.0271 | −12 | 37 | 56 | IVEGSDAEIGM |
| | | | | | | SPWQVM |
| | | | | | | LFR |

| | |
|---|---|
| Chain A, Crystal Structure Of Thrombin In Complex | gi\|20150575 |
| With A Novel Bicyclic Lactam Inhibitor | |

[0415] Peptide Information

| | Obsrv. | | | Start | | |
|---|---|---|---|---|---|---|
| Calc. Mass | Mass | ±da | ±ppm | Seq. | End Seq. | Sequence |
| 874.4781 | 874.4888 | .0107 | 12 | 174 | 181 | VTGWGNLK |
| 951.4894 | 951.5774 | .088 | 92 | 107 | 113 | YERNIEK |
| 1189.579 | 1189.5732 | −.0058 | −5 | 273 | 281 | YGFYTHVFR |
| 1194.6001 | 1194.5807 | −.0194 | −16 | 27 | 36 | ELLESYIDGR |
| 1194.6001 | 1194.5807 | −.0194 | −16 | 27 | 36 | ELLESYIDGR |
| 1265.6022 | 1265.592 | −.0102 | −8 | 126 | 134 | YNWRENLDR |
| 1489.7223 | 1489.7014 | −.0209 | −14 | 270 | 281 | DGKYGFYTHVFR |
| 1542.62 | 1542.6259 | .0059 | 4 | 234 | 248 | GDACEGDSGG |
| | | | | | | PFVMK |
| 1645.8214 | 1645.7874 | −.034 | −21 | 58 | 72 | SPQELLCGASL |
| | | | | | | ISDR |
| 1698.7211 | 1698.6948 | −.0263 | −15 | 233 | 248 | RGDACEGDSG |
| | | | | | | GPFVMK |
| 1773.9164 | 1773.8727 | −.0437 | −25 | 57 | 72 | KSPQELLCGAS |
| | | | | | | LISDR |
| 1883.8956 | 1883.8428 | −.0528 | −28 | 1 | 17 | TFGSGEADCG |
| | | | | | | LRPLFEK |
| 1883.8956 | 1883.8428 | −.0528 | −28 | 1 | 17 | TFGSGEADCG |
| | | | | | | LRPLFEK |
| 2001.9158 | 2001.8715 | −.0443 | −22 | 217 | 233 | ITDNMFCAGYK |
| | | | | | | PDEGKR |
| 2011.9906 | 2011.9392 | −.0514 | −26 | 1 | 18 | TFGSGEADCG |
| | | | | | | LRPLFEKK |
| 2017.9106 | 2017.8978 | −.0128 | −6 | 217 | 233 | ITDNMFCAGYK |
| | | | | | | PDEGKR |
| 2232.2534 | 2232.1794 | −.074 | −33 | 191 | 210 | GQPSVLQVVNL |
| | | | | | | PIVERPV |
| | | | | | | CK |
| 2232.2534 | 2232.1794 | −.074 | −33 | 191 | 210 | GQPSVLQVVNL |
| | | | | | | PIVERPV |
| | | | | | | CK |
| 2281.0991 | 2281.072 | −.0271 | −12 | 37 | 56 | IVEGSDAEIGM |
| | | | | | | SPWQVM LFR |

| | |
|---|---|
| Chain A, Structure Of Thrombin Complexed With | gi\|11514286 |
| Selective Non-Electrophilic Inhibitors Having | |
| Cyclohexyl Moieties At | |
| P1 | |

[0416] Protein Group

| | |
|---|---|
| Chain A, Crystal Structure Of Human Alpha-Thrombin | gi\|14278416 |
| Complexed With Bch-10556 And Exosite-Directed | |
| Peptide | |

[0417] Peptide Information

| | | | | Start | | |
|---|---|---|---|---|---|---|
| Calc. Mass | Obsrv. Mass | ±da | ±ppm | Seq. | End Seq. | Sequence |
| 874.4781 | 874.4888 | .0107 | 12 | 168 | 175 | VTGWGNLK |
| 951.4894 | 951.5774 | .088 | 92 | 101 | 107 | YERNIEK |
| 1176.6412 | 1176.5833 | −.0579 | −49 | 279 | 287 | WIQKVIDQF |
| 1189.579 | 1189.5732 | −.0058 | −5 | 267 | 275 | YGFYTHVFR |
| 1194.6001 | 1194.5807 | −.0194 | −16 | 21 | 30 | ELLESYIDGR |
| 1194.6001 | 1194.5807 | −.0194 | −16 | 21 | 30 | ELLESYIDGR |
| 1265.6022 | 1265.592 | −.0102 | −8 | 120 | 128 | YNWRENLDR |
| 1489.7223 | 1489.7014 | −.0209 | −14 | 264 | 275 | DGKYGFYTHVFR |
| 1542.62 | 1542.6259 | .0059 | 4 | 228 | 242 | GDACEGDSGG |
| | | | | | | PFVMK |
| 1645.8214 | 1645.7874 | −.034 | −21 | 52 | 66 | SPQELLCGASL |
| | | | | | | ISDR |
| 1698.7211 | 1698.6948 | −.0263 | −15 | 227 | 242 | RGDACEGDSG |
| | | | | | | GPFVMK |
| 1773.9164 | 1773.8727 | −.0437 | −25 | 51 | 66 | KSPQELLCGAS |
| | | | | | | LISDR |
| 2001.9158 | 2001.8715 | −.0443 | −22 | 211 | 227 | ITDNMFCAGYK |
| | | | | | | PDEGKR |
| 2017.9106 | 2017.8978 | −.0128 | −6 | 211 | 227 | ITDNMFCAGYK |
| | | | | | | PDEGKR |
| 2232.2534 | 2232.1794 | −.074 | −33 | 185 | 204 | GQPSVLQVVNL |
| | | | | | | PIVERPV |
| | | | | | | CK |
| 2232.2534 | 2232.1794 | −.074 | −33 | 185 | 204 | GQPSVLQVVNL |
| | | | | | | PIVERPV |
| | | | | | | CK |
| 2281.0991 | 2281.072 | −.0271 | −12 | 31 | 50 | IVEGSDAEIGM |
| | | | | | | SPWQVM |
| | | | | | | LFR |

| | |
|---|---|
| Chain A, Design Of P1′ And P3′ Residues | gi\|7766843 |
| Of Trivalent Thrombin Inhibitors And Their | |
| Crystal Structures | |

[0418] Protein Group

| | |
|---|---|
| Chain A, Design Of P1′ And P3′ Residues Of Trivalent | gi\|7766841 |
| Thrombin Inhibitors And Their Crystal Structures | |

[0419] Peptide Information

| | Obsrv. | | | Start | End | |
|---|---|---|---|---|---|---|
| Calc. Mass | Mass | ±da | ±ppm | Seq. | Seq. | Sequence |
| 874.4781 | 874.4888 | .0107 | 12 | 170 | 177 | VTGWGNLK |
| 951.4894 | 951.5774 | .088 | 92 | 103 | 109 | YERNIEK |
| 1176.6412 | 1176.5833 | −.0579 | −49 | 281 | 289 | WIQKVIDQF |
| 1189.579 | 1189.5732 | −.0058 | −5 | 269 | 277 | YGFYTHVFR |
| 1194.6001 | 1194.5807 | −.0194 | −16 | 23 | 32 | ELLESYIDGR |
| 1194.6001 | 1194.5807 | −.0194 | −16 | 23 | 32 | ELLESYIDGR |
| 1265.6022 | 1265.592 | −.0102 | −8 | 122 | 130 | YNWRENLDR |
| 1489.7223 | 1489.7014 | −.0209 | −14 | 266 | 277 | DGKYGFYTHVFR |
| 1542.62 | 1542.6259 | .0059 | 4 | 230 | 244 | GDACEGDSGGPF |
| | | | | | | VMK |
| 1645.8214 | 1645.7874 | −.034 | −21 | 54 | 68 | SPQELLCGASLISDR |
| 1698.7211 | 1698.6948 | −.0263 | −15 | 229 | 244 | RGDACEGDSGGP |
| | | | | | | FVMK |
| 1773.9164 | 1773.8727 | −.0437 | −25 | 53 | 68 | KSPQELLCGASLIS |
| | | | | | | DR |
| 2001.9158 | 2001.8715 | −.0443 | −22 | 213 | 229 | ITDNMFCAGYK |
| | | | | | | PDEGKR |
| 2017.9106 | 2017.8978 | −.0128 | −6 | 213 | 229 | ITDNMFCAGYK |
| | | | | | | PDEGKR |
| 2232.2534 | 2232.1794 | −.074 | −33 | 187 | 206 | GQPSVLQVVNL |
| | | | | | | PIVERPV |
| | | | | | | CK |
| 2232.2534 | 2232.1794 | −.074 | −33 | 187 | 206 | GQPSVLQVVNL |
| | | | | | | PIVERPV |
| | | | | | | CK |
| 2281.0991 | 2281.072 | −.0271 | −12 | 33 | 52 | IVEGSDAEIGM |
| | | | | | | SPWQVM |
| | | | | | | LFR |

| | |
|---|---|
| Chain L, Crystal Structure Of The Heparin | gi\|23200174 |
| Cofactor Ii-S195a Thrombin | |
| Complex | |

[0420] Peptide Information

| | | | | Start | | |
|---|---|---|---|---|---|---|
| Calc. Mass | Obsrv. Mass | ±da | ±ppm | Seq. | End Seq. | Sequence |
| 1561.7281 | 1561.6975 | −.0306 | −20 | 1 | 13 | TATSEYQTFFNPR |
| 1561.7281 | 1561.6975 | −.0306 | −20 | 1 | 13 | TATSEYQTFFNPR |
| 1883.8956 | 1883.8428 | −.0528 | −28 | 14 | 30 | TFGSGEADCGLRP |
| | | | | | | LFEK |
| 1883.8956 | 1883.8428 | −.0528 | −28 | 14 | 30 | TFGSGEADCGLRP |
| | | | | | | LFEK |
| 2011.9906 | 2011.9392 | −.0514 | −26 | 14 | 31 | TFGSGEADCGLRP |
| | | | | | | LFEKK |

| | |
|---|---|
| Chain A, Crystal Structure Of The | gi\|27065656 |
| Anticoagulant Slow | |
| Form Of Thrombin | |

[0421] Protein Group

| | |
|---|---|
| Chain B, Crystal Structure Of The | gi\|27065657 |
| Anticoagulant Slow | |
| Form Of Thrombin | |

[0422] Peptide Information

| | Obsrv. | | | Start | | |
|---|---|---|---|---|---|---|
| Calc. Mass | Mass | ±da | ±ppm | Seq. | End Seq. | Sequence |
| 874.4781 | 874.4888 | .0107 | 12 | 168 | 175 | VTGWGNLK |
| 1176.6412 | 1176.5833 | −.0579 | −49 | 279 | 287 | WIQKVIDQF |
| 1189.579 | 1189.5732 | −.0058 | −5 | 267 | 275 | YGFYTHVFR |
| 1194.6001 | 1194.5807 | −.0194 | −16 | 21 | 30 | ELLESYIDGR |
| 1194.6001 | 1194.5807 | −.0194 | −16 | 21 | 30 | ELLESYIDGR |
| 1265.6022 | 1265.592 | −.0102 | −8 | 120 | 128 | YNWRENLDR |
| 1489.7223 | 1489.7014 | −.0209 | −14 | 264 | 275 | DGKYGFYTHVFR |
| 1542.62 | 1542.6259 | .0059 | 4 | 228 | 242 | GDACEGDSGG |
| | | | | | | PFVMK |
| | 1542.6259 | | | | | |
| 1645.8214 | 1645.7874 | −.034 | −21 | 52 | 66 | SPQELLCGASL |
| | | | | | | ISDR |
| 1698.7211 | 1698.6948 | −.0263 | −15 | 227 | 242 | RGDACEGDSG |
| | | | | | | GPFVMK |
| 1773.9164 | 1773.8727 | −.0437 | −25 | 51 | 66 | KSPQELLCGAS |
| | | | | | | LISDR |
| 2001.9158 | 2001.8715 | −.0443 | −22 | 211 | 227 | ITDNMFCAGYK |
| | | | | | | PDEGKR |
| 2017.9106 | 2017.8978 | −.0128 | −6 | 211 | 227 | ITDNMFCAGYK |
| | | | | | | PDEGKR |
| 2232.2534 | 2232.1794 | −.074 | −33 | 185 | 204 | GQPSVLQVVNL |
| | | | | | | PIVERPV |
| | | | | | | CK |
| 2232.2534 | 2232.1794 | −.074 | −33 | 185 | 204 | GQPSVLQVVNL |
| | | | | | | PIVERPV |
| | | | | | | CK |
| 2281.0991 | 2281.072 | −.0271 | −12 | 31 | 50 | IVEGSDAEIGM |
| | | | | | | SPWQVM |
| | | | | | | LFR |

Chain A, Thrombin In Complex With
Inhibitor

[0423] Protein Group

| | |
|---|---|
| | gi\|118137345 |
| Chain A, Crystal Structue Of Thrombin In Complex | gi\|51247369 |
| With | |
| A Potent P1 Heterocycle-Aryl Based Inhibitor | |
| Chain A, Crystal Structure Of Thrombin In Complex | gi\|49259293 |
| With Compound 14b | |
| Chain A, Crystal Structure Of Thrombin In Complex | gi\|170292482 |
| With Inhibitor 15 | |
| Chain A, Structure Of Thrombin Complexed With | gi\|11514212 |
| Selective Non-Electophilic Inhibitors Having | |
| Cyclohexyl | |
| Moieties At P1 | |
| Chain A, Thrombin And P2 Pyridine N-Oxide Inhibitor | gi\|67464365 |
| Complex Structure | |
| Chain A, Thrombin In Complex With An Azafluorenyl | gi\|71042452 |
| Inhibitor | |
| 23b | |
| Chain A, Thrombin In Complex With An | gi\|78101061 |
| Oxazolopyridine | |
| Inhibitor 2 | |
| Chain A, Thrombin In Complex With An | gi\|78101058 |
| Oxazolopyridine | |
| Inhibitor 21 | |

[0424] Peptide Information

| | | | | Start | | |
|---|---|---|---|---|---|---|
| Calc. Mass | Obsrv. Mass | ±da | ±ppm | Seq. | End Seq. | Sequence |
| 874.4781 | 874.4888 | .0107 | 12 | 168 | 175 | VTGWGNLK |
| 951.4894 | 951.5774 | .088 | 92 | 101 | 107 | YERNIEK |
| 1189.579 | 1189.5732 | −.0058 | −5 | 267 | 275 | YGFYTHVFR |
| 1194.6001 | 1194.5807 | −.0194 | −16 | 21 | 30 | ELLESYIDGR |
| 1194.6001 | 1194.5807 | −.0194 | −16 | 21 | 30 | ELLESYIDGR |
| 1265.6022 | 1265.592 | −.0102 | −8 | 120 | 128 | YNWRENLDR |
| 1489.7223 | 1489.7014 | −.0209 | −14 | 264 | 275 | DGKYGFYTHVFR |
| 1542.62 | 1542.6259 | .0059 | 4 | 228 | 242 | GDACEGDSGG |
| | | | | | | PFVMK |
| 1645.8214 | 1645.7874 | −.034 | −21 | 52 | 66 | SPQELLCGASL |
| | | | | | | ISDR |
| 1698.7211 | 1698.6948 | −.0263 | −15 | 227 | 242 | RGDACEGDSG |
| | | | | | | GPFVMK |
| 1773.9164 | 1773.8727 | −.0437 | −25 | 51 | 66 | KSPQELLCGAS |
| | | | | | | LISDR |
| 2001.9158 | 2001.8715 | −.0443 | −22 | 211 | 227 | ITDNMFCAGYK |
| | | | | | | PDEGKR |
| 2017.9106 | 2017.8978 | −.0128 | −6 | 211 | 227 | ITDNMFCAGYK |
| | | | | | | PDEGKR |
| 2232.2534 | 2232.1794 | −.074 | −33 | 185 | 204 | GQPSVLQVVNL |
| | | | | | | PIVERPV |
| | | | | | | CK |
| 2232.2534 | 2232.1794 | −.074 | −33 | 185 | 204 | GQPSVLQVVNL |
| | | | | | | PIVERPV |
| | | | | | | CK |
| 2281.0991 | 2281.072 | −.0271 | −12 | 31 | 50 | IVEGSDAEIGM |
| | | | | | | SPWQVM |
| | | | | | | LFR |

| | |
|---|---|
| Chain L, Selectivity At S1, H2o Displacement, | gi\|157877724 |
| Upa, Tpa, Ser190ALA190 | |
| PROTEASE, STRUCTURE- | |
| Based | |
| Drug | |
| Design | |

[0425] Protein Group

| | |
|---|---|
| Chain L, A Novel Serine Protease Inhibition Motif | gi\|157877659 |
| Involving A Multi-Centered Short Hydrogen Bonding | |
| Network At The Active | |
| Site | |
| Chain L, A Novel Serine Protease Inhibition Motif | gi\|157877654 |
| Involving A Multi-Centered Short Hydrogen Bonding | |
| Network At The Active | |
| Site | |
| Chain L, A Novel Serine Protease Inhibition Motif | gi\|157877650 |
| Involving A Multi-Centered Short Hydrogen Bonding | |
| Network At The Active | |
| Site | |
| Chain L, A Novel Serine Protease Inhibition Motif | gi\|157877646 |
| Involving A Multi-Centered Short Hydrogen Bonding | |
| Network At The Active | |
| Site | |
| Chain L, Elaborate Manifold Of Short Hydrogen Bond | gi\|157879449 |
| Arrays Mediating Binding Of Active Site-Directed | |
| Serine | |
| Protease Inhibitors | |
| Chain L, Structural Basis For Selectivity Of A Small | gi\|157838401 |
| Molecule, S1-Binding, Sub-Micromolar Inhibitor Of | |
| Urokinase Type Plasminogen Activator | |
| Chain L, Structural Basis For Selectivity Of A Small | gi\|157838398 |
| Molecule, S1-Binding, Sub-Micromolar Inhibitor Of | |
| Urokinase Type Plasminogen Activator | |
| Chain L, Structural Basis For Selectivity Of A Small | gi\|157838393 |
| Molecule, S1-Binding, Sub-Micromolar Inhibitor Of | |
| Urokinase Type Plasminogen Activator | |

[0426] Peptide Information

| | Obsrv. | | | Start | End | |
|---|---|---|---|---|---|---|
| Calc. Mass | Mass | ±da | ±ppm | Seq. | Seq. | Sequence |
| 1194.6001 | 1194.5807 | −.0194 | −16 | 27 | 36 | ELLESYIDGX |
| 1883.8956 | 1883.8428 | −.0528 | −28 | 1 | 17 | TFGSGEADCGLRPLFEK |

| | |
|---|---|
| CASP8 associated protein 2, isoform CRA_c | gi\|119568927 |
| [Homo sapiens] | |

[0427] Protein Group

| | |
|---|---|
| CASP8 associated protein 2 [Homo sapiens] | gi\|55958516 |
| CASP8 associated protein 2, isoform CRA_a [Homo | gi\|119568925 |
| sapiens] | |
| CASP8 associated protein 2, isoform CRA_c [Homo | gi\|119568929 |
| sapiens] | |
| CASP8-associated protein 2 [Homo sapiens] | gi\|212549782 |
| CASP8-associated protein 2 [Homo sapiens] | gi\|6912288 |
| CASP8-associated protein 2 [Homo sapiens] | gi\|212549532 |
| CASP8-associated protein 2 [Homo sapiens] | |
| CASP8AP2 protein [Homo sapiens] | gi\|152012538 |
| Caspase 8 associated protein 2 [Homo sapiens] | gi\|124376904 |
| Caspase 8 associated protein 2 [Homo sapiens] | gi\|124376190 |
| FLASH [Homo sapiens] | gi\|6090856 |
| FLASH homolog RIP25 [Homo sapiens] | gi\|6760665 |
| KIAA1315 protein [Homo sapiens] | gi\|20521882 |
| RecName: Full = CASP8-associated protein 2; AltName: | gi\|74721007 |
| Full = FLICE-associated huge protein | |

[0428] Peptide Information

| | | | | Star | End | |
|---|---|---|---|---|---|---|
| Calc. | Obsr | ±da | ±ppm | Seq. | Seq. | Sequence |
| 1148.5178 | 1148.5477 | .0299 | 26 | 476 | 484 | EQESKEENR |

| | | | |
|---|---|---|---|
| | 65/C14 | | Instr./Gel |
| | | | Origin |
| | [1] Sample Project | | Instrument |
| | 20110503 | | Sample |
| | | | Name |
| Protein Name- | KH13 (SEQ ID NO. KH13) | Accession No. | |

| | |
|---|---|
| unnamed protein product [Homo sapiens] | gi\|194391084 |

[0429] Peptide Information

| | Obsrv. | | | Start | | |
|---|---|---|---|---|---|---|
| Calc. Mass | Mass | ±da | ±ppm | Seq. | End Seq. | Sequence |
| 861.407 | 861.4134 | .0064 | 7 | 251 | 257 | ICVGCPR |
| 861.407 | 861.4134 | .0064 | 7 | 251 | 257 | ICVGCPR |
| 1003.5684 | 1003.5687 | .0003 | 0 | 176 | 184 | QVVAGLNFR |
| 1003.5684 | 1003.5687 | .0003 | 0 | 176 | 184 | QVVAGLNFR |
| 1030.5356 | 1030.5386 | .003 | 3 | 305 | 312 | YFIDFVAR |
| 1030.5356 | 1030.5386 | .003 | 3 | 305 | 312 | YFIDFVAR |
| 1158.6306 | 1158.6343 | .0037 | 3 | 304 | 312 | KYFIDFVAR |
| 1251.5892 | 1251.5988 | .0096 | 8 | 53 | 63 | TVGSDTFYSFK |
| 1321.653 | 1321.6519 | −.0011 | −1 | 90 | 102 | AATGECTATVG |
| | | | | | | KR |
| 1874.8781 | 1874.8669 | −.0112 | −6 | 32 | 46 | YNSQNQSNNQ |
| | | | | | | FVLYR |
| 1874.8781 | 1874.8669 | −.0112 | −6 | 32 | 46 | YNSQNQSNNQ |
| | | | | | | FVLYR |
| 2441.1038 | 2441.092 | −.0118 | −5 | 208 | 228 | SLWNGDTGEC |
| | | | | | | TDNAYIDI |
| | | | | | | QLR |
| 2512.2178 | 2512.2173 | −.0005 | 0 | 229 | 250 | IASFSQNCDIYP |
| | | | | | | GKDFVQ |
| | | | | | | PPTK |

| | |
|---|---|
| kininogen 1, isoform CRA_a [Homo sapiens] | gi\|119598585 |
| Kininogen 1 [Homo sapiens] | gi\|37748641 |

[0430] Protein Group

| | |
|---|---|
| kininogen 1 variant [Homo sapiens] | gi\|62898910 |
| kininogen 1, isoform CRA_a [Homo sapiens] | gi\|119598587 |
| kininogen [Homo sapiens] | gi\|386853 |
| kininogen [Homo sapiens] | gi\|28932976 |
| kininogen-1 isoform 2 [Homo sapiens] | gi\|4504893 |
| prepro alpha-2-thiol proteinase inhibitor [Homo sapiens] | gi\|177890 |
| unnamed protein product [Homo sapiens] | gi\|213506121 |
| unnamed protein product [Homo sapiens] | gi\|213506103 |
| unnamed protein product [Homo sapiens] | gi\|207100681 |
| unnamed protein product [Homo sapiens] | gi\|207100663 |
| unnamed protein product [Homo sapiens] | gi\|189054825 |
| unnamed protein product [Homo sapiens] | gi\|158255114 |

[0431] Peptide Information

| | Obsrv. | | | Start | End | |
|---|---|---|---|---|---|---|
| Calc. Mass | Mass | ±da | ±ppm | Seq. | Seq. | Sequence |
| 861.407 | 861.4134 | .0064 | 7 | 263 | 269 | ICVGCPR |
| 861.407 | 861.4134 | .0064 | 7 | 263 | 269 | ICVGCPR |
| 1003.5684 | 1003.5687 | .0003 | 0 | 188 | 196 | QVVAGLNFR |
| 1003.5684 | 1003.5687 | .0003 | 0 | 188 | 196 | QVVAGLNFR |
| 1030.5356 | 1030.5386 | .003 | 3 | 317 | 324 | YFIDFVAR |
| 1030.5356 | 1030.5386 | .003 | 3 | 317 | 324 | YFIDFVAR |
| 1158.6306 | 1158.6343 | .0037 | 3 | 316 | 324 | KYFIDFVAR |
| 1251.5892 | 1251.5988 | .0096 | 8 | 65 | 75 | TVGSDTFYSFK |
| | 1251.5988 | | | | | |
| 1321.653 | 1321.6519 | −.0011 | −1 | 102 | 114 | AATGECTATVGKR |
| 1874.8781 | 1874.8669 | −.0112 | −6 | 44 | 58 | YNSQNQSNNQFVLYR |
| 1874.8781 | 1874.8669 | −.0112 | −6 | 44 | 58 | YNSQNQSNNQFVLYR |
| 2441.1038 | 2441.092 | −.0118 | −5 | 220 | 240 | SLWNGDTGE |
| | | | | | | CTDNAYIDI QLR |
| 2512.2178 | 2512.2173 | −.0005 | 0 | 241 | 262 | IASFSQNCDIYPGKDFVQ |

| | |
|---|---|
| RecName: Full = Kininogen-1; AltName: | gi\|124056474 |

| | |
|---|---|
| Full = Alpha-2-thiol proteinase inhibitor; AltName: | |
| Full = Fitzgerald factor; AltName: Full = High molecular | |
| weight kininogen; Short = HMWK; AltName: | |
| Full = Williams-Fitzgerald-Flaujeac factor; Contains: | |
| RecName: Full = Kininogen-1 heavy chain; Contains: | |
| RecName: Full = T-kinin; AltName: | |
| Full = Ile-Ser-Bradykinin; Contains: RecName: | |
| Full = Bradykinin; AltName: Full = Kallidin I; Contains: | |
| RecName: Full = Lysyl-bradykinin; AltName: | |
| Full = Kallidin | |
| II; Contains: RecName: Full = Kininogen-1 light chain; | |
| PPTK | |
| Contains: RecName: Full = Low molecular weight | |
| growth-promoting factor; Flags: Precursor | |
| kininogen 1, isoform CRA_b [Homo sapiens] | gi\|119598586 |
| kininogen [Homo sapiens] | gi\|386852 |
| kininogen-1 isoform 1 [Homo sapiens] | gi\|156231037 |
| unnamed protein product [Homo sapiens] | gi\|298886629 |
| unnamed protein product [Homo sapiens] | gi\|194383526 |

[0432] Protein Group

| Calc. | Obsrv. | | | Start | | |
|---|---|---|---|---|---|---|
| Mass | Mass | ±da | ±ppm | Seq. | End Seq. | Sequence |
| 861.407 | 861.4134 | .0064 | 7 | 263 | 269 | ICVGCPR |
| 861.407 | 861.4134 | .0064 | 7 | 263 | 269 | ICVGCPR |
| 940.4747 | 940.4385 | −.0362 | −38 | 513 | 520 | NGKHNGWK |
| 1003.5684 | 1003.5687 | .0003 | 0 | 188 | 196 | QVVAGLNFR |
| 1003.5684 | 1003.5687 | .0003 | 0 | 188 | 196 | QVVAGLNFR |
| 1030.5356 | 1030.5386 | .003 | 3 | 317 | 324 | YFIDFVAR |
| 1030.5356 | 1030.5386 | .003 | 3 | 317 | 324 | YFIDFVAR |
| 1158.6306 | 1158.6343 | .0037 | 3 | 316 | 324 | KYFIDFVAR |
| 1251.5892 | 1251.5988 | .0096 | 8 | 65 | 75 | TVGSDTFYSFK |
| 1321.653 | 1321.6519 | −.0011 | −1 | 102 | 114 | AATGECTATVGKR |
| 1874.8781 | 1874.8669 | −.0112 | −6 | 44 | 58 | YNSQNQSNNQFVL [symbol] |
| 1874.8781 | 1874.8669 | −.0112 | −6 | 44 | 58 | YNSQNQSNNQFVL [symbol] |
| 2441.1038 | 2441.092 | −.0118 | −5 | 220 | 240 | SLWNGDTGECTDN [symbol] |
| | | | | | | QLR |
| 2512.2178 | 2512.2173 | −.0005 | 0 | 241 | 262 | IASFSQNCDIYPGK [symbol] |
| | | | | | | PPTK |

| | |
|---|---|
| kininogen-1 isoform 3 | gi\|262050546 |
| [Homo sapiens] | |

[symbol]

indicates data missing or illegible when filed

[0433] Peptide Information

| Calc. | Obsrv. | | | Start | End | |
|---|---|---|---|---|---|---|
| Mass | Mass | ±da | ±ppm | Seq. | Seq. | Sequence |
| 861.407 | 861.4134 | .0064 | 7 | 227 | 233 | ICVGCPR |
| 861.407 | 861.4134 | .0064 | 7 | 227 | 233 | ICVGCPR |
| 1030.5356 | 1030.5386 | .003 | 3 | 281 | 288 | YFIDFVAR |
| | 1030.5386 | | | | | |
| 1030.5356 | 1030.5386 | .003 | 3 | 281 | 288 | YFIDFVAR |
| 1158.6306 | 1158.6343 | .0037 | 3 | 280 | 288 | KYFIDFVAR |
| 1251.5892 | 1251.5988 | .0096 | 8 | 65 | 75 | TVGSDTFYSFK |
| 1321.653 | 1321.6519 | −.0011 | −1 | 102 | 114 | AATGECTATVGKR |
| 1874.8781 | 1874.8669 | −.0112 | −6 | 44 | 58 | YNSQNQSNNQFVLYR |
| 1874.8781 | 1874.8669 | −.0112 | −6 | 44 | 58 | YNSQNQSNNQFVLYR |
| 2512.2178 | 2512.2173 | −.0005 | 0 | 205 | 226 | IASFSQNCDIYPGKDFVQ |
| | | | | | | PPTK |

| | |
|---|---|
| KNG1 protein [Homo sapiens] | gi\|116283732 |

[0434] Peptide Information

| Calc. | Obsrv. | | | Start | End | |
|---|---|---|---|---|---|---|
| Mass | Mass | ±da | ±ppm | Seq. | Seq. | Sequence |
| 861.407 | 861.4134 | .0064 | 7 | 127 | 133 | ICVGCPR |
| 861.407 | 861.4134 | .0064 | 7 | 127 | 133 | ICVGCPR |
| 1003.5684 | 1003.5687 | .0003 | 0 | 52 | 60 | QVVAGLNFR |
| 1003.5684 | 1003.5687 | .0003 | 0 | 52 | 60 | QVVAGLNFR |
| 1030.5356 | 1030.5386 | .003 | 3 | 181 | 188 | YFIDFVAR |
| 1030.5356 | 1030.5386 | .003 | 3 | 181 | 188 | YFIDFVAR |
| 1158.6306 | 1158.6343 | .0037 | 3 | 180 | 188 | KYFIDFVAR |
| 2441.1038 | 2441.092 | −.0118 | −5 | 84 | 104 | SLWNGDTGECTDNAYIDI |
| | | | | | | QLR |
| 2512.2178 | 2512.2173 | −.0005 | 0 | 105 | 126 | IASFSQNCDIYPGKDFVQ |
| | | | | | | PPTK |

| | |
|---|---|
| bromodomain and PHD finger | gi\|119584376 |
| containing, 1, isoform | |
| CRA_a [Homo | |
| sapiens] | |

[0435] Peptide Information

| Calc. | Obsrv. | | | Start | End | |
|---|---|---|---|---|---|---|
| Mass | Mass | ±da | ±ppm | Seq. | Seq. | Sequence |
| 812.3719 | 812.3501 | −.0218 | −27 | 125 | 130 | SQFMQR |
| 814.4094 | 814.3828 | −.0266 | −33 | 257 | 262 | DTIFYR |
| 823.4056 | 823.3383 | −.0673 | −82 | 2 | 8 | SYAQAQR |
| 875.4985 | 875.4634 | −.0351 | −40 | 87 | 93 | LPEVVYR |
| 940.4669 | 940.4385 | −.0284 | −30 | 124 | 130 | KSQFMQR |
| 986.5206 | 986.5446 | .024 | 24 | 453 | 459 | TWQWLPR |
| 986.5206 | 986.5446 | .024 | 24 | 453 | 459 | TWQWLPR |
| 1158.5637 | 1158.6343 | .0706 | 61 | 48 | 58 | ENTETPAATPK |
| 1875.9131 | 1875.8643 | −.0488 | −26 | 2 | 17 | SYAQAQRMVEVDLHGR |
| 2487.1936 | 2487.0796 | −.114 | −46 | 206 | 225 | ETVPDYLDHIKKPMDFFT |
| | | | | | | MK |
| 2512.3203 | 2512.2173 | −.103 | −41 | 408 | 429 | MPREGMFHHGVPIPVPP |
| | | | | | | LEVLK |

| | |
|---|---|
| tripartite motif-containing 14, isoform | gi\|119579276 |
| CRA_c [Homo | |
| sapiens] | |

[0436] Protein Group

| | |
|---|---|
| tripartite motif-containing 14, isoform | gi\|119579280 |
| CRA_c [Homo sapiens] | |

[0437] Peptide Information

| Calc. | Obsrv. | | | Start | End | |
|---|---|---|---|---|---|---|
| Mass | Mass | ±da | ±ppm | Seq. | Seq. | Sequence |
| 821.3974 | 821.3503 | −.0471 | −57 | 267 | 272 | QSWCLK |
| 826.3512 | 826.3759 | .0247 | 30 | 222 | 228 | DCFATGR |
| 834.3951 | 834.3577 | −.0374 | −45 | 8 | 15 | QANAESSK |
| 846.425 | 846.3918 | −.0332 | −39 | 1 | 7 | MPPRSSR |
| 865.3468 | 865.4075 | .0607 | 70 | 53 | 59 | EQADSCR |
| 1030.6005 | 1030.5386 | −.0619 | −60 | 189 | 197 | LSADRLTVR |
| 1030.6005 | 1030.5386 | −.0619 | −60 | 189 | 197 | LSADRLTVR |
| 1890.0219 | 1889.8698 | −.1521 | −80 | 22 | 37 | FTELRLLLDEEEALAK |
| 2082.0034 | 2081.917 | −.0864 | −41 | 43 | 59 | NTQLTLQVYREQADSCR |

| | |
|---|---|
| unnamed protein product | gi\|21754039 |
| [Homo sapiens] | |

[0438] Peptide Information

| Calc. | Obsrv. | | | Start | End | |
|---|---|---|---|---|---|---|
| Mass | Mass | ±da | ±ppm | Seq. | Seq. | Sequence |
| 802.4457 | 802.3769 | −.0688 | −86 | 471 | 476 | QWLVEK |
| 804.4097 | 804.3864 | −.0233 | −29 | 584 | 590 | LSDLDNK |
| 805.3839 | 805.3542 | −.0297 | −37 | 79 | 85 | FSEASHK |
| 809.4185 | 809.3559 | −.0626 | −77 | 364 | 370 | MNKTATK |
| 820.4345 | 820.3617 | −.0728 | −89 | 72 | 78 | MKDLSAR |
| 823.4196 | 823.3383 | −.0813 | −99 | 392 | 398 | SFEAELK |
| 846.4316 | 846.3918 | −.0398 | −47 | 385 | 391 | TQVEQNK |
| 859.4883 | 859.4249 | −.0634 | −74 | 404 | 410 | VQELKDK |
| | 859.4249 | | | | | |
| 865.3971 | 865.4075 | .0104 | 12 | 187 | 193 | EMEDTIK |
| 1030.5527 | 1030.5386 | −.0141 | −14 | 616 | 623 | QEIQQEKK |
| 1030.5527 | 1030.5386 | −.0141 | −14 | 616 | 623 | QEIQQEKK |
| 1251.6368 | 1251.5988 | −.038 | −30 | 689 | 698 | DFQAWLDTKK |
| 2067.9839 | 2067.9341 | −.0498 | −24 | 347 | 363 | LQKAQEESSAMMQWLQK |

| | |
|---|---|
| KIAA1274 [Homo | gi\|57209115 |
| sapiens] | |

[0439] Peptide Information

| Calc. | Obsrv. | | | Start | End | |
|---|---|---|---|---|---|---|
| Mass | Mass | ±da | ±ppm | Seq. | Seq. | Sequence |
| 812.4162 | 812.3501 | −.0661 | −81 | 415 | 420 | HSVWQR |
| 817.4315 | 817.3644 | −.0671 | −82 | 78 | 84 | AHYTLGR |
| 835.4308 | 835.3686 | −.0622 | −74 | 593 | 599 | EGPLTYR |
| 856.5615 | 856.4853 | −.0762 | −89 | 146 | 152 | VLQKLQK |
| 859.4567 | 859.4249 | −.0318 | −37 | 364 | 370 | MVPQGRR |
| 870.5407 | 870.5418 | .0011 | 1 | 48 | 55 | AKSIIPNK |
| 986.6146 | 986.5446 | −.07 | −71 | 541 | 548 | KVVWVSLR |
| 986.6146 | 986.5446 | −.07 | −71 | 541 | 548 | KVVWVSLR |
| 1874.9832 | 1874.8669 | −.1163 | −62 | 184 | 200 | DKQNLHENLQGLGPGVR |
| 1874.9832 | 1874.8669 | −.1163 | −62 | 184 | 200 | DKQNLHENLQGLGPGVR |
| 2067.9851 | 2067.9341 | −.051 | −25 | 600 | 615 | FQTCLTMQEVFSQHRR |
| 2082.0437 | 2081.917 | −.1267 | −61 | 125 | 144 | QVQGGLTVFGMGQPSLS |
| | | | | | | GFR |

| | |
|---|---|
| paladin [Homo | gi\|166235184 |
| sapiens] | |

[0440] Protein Group

| | |
|---|---|
| KIAA1274, isoform CRA_a | gi\|119574791 |
| [Homo sapiens] | |
| KIAA1274, isoform CRA_a | gi\|119574789 |
| [Homo sapiens] | |
| RecName: | gi\|146325028 |
| Full = Paladin | |

[0441] Peptide Information

| Calc. | Obsrv. | | | Start | End | |
|---|---|---|---|---|---|---|
| Mass | Mass | ±da | ±ppm | Seq. | Seq. | Sequence |
| 812.4162 | 812.3501 | −.0661 | −81 | 415 | 420 | HSVWQR |
| 817.4315 | 817.3644 | −.0671 | −82 | 78 | 84 | AHYTLGR |
| 835.4308 | 835.3686 | −.0622 | −74 | 593 | 599 | EGPLTYR |
| 856.5615 | 856.4853 | −.0762 | −89 | 146 | 152 | VLQKLQK |
| 859.4567 | 859.4249 | −.0318 | −37 | 364 | 370 | MVPQGRR |
| 870.5407 | 870.5418 | .0011 | 1 | 48 | 55 | AKSIIPNK |
| 986.6146 | 986.5446 | −.07 | −71 | 541 | 548 | KVVWVSLR |
| 986.6146 | 986.5446 | −.07 | −71 | 541 | 548 | KVVWVSLR |
| 1874.9832 | 1874.8669 | −.1163 | −62 | 184 | 200 | DKQNLHENLQGLGPGVR |
| 1874.9832 | 1874.8669 | −.1163 | −62 | 184 | 200 | DKQNLHENLQGLGPGVR |
| 2067.9851 | 2067.9341 | −.051 | −25 | 600 | 615 | FQTCLTMQEVFSQHRR |
| 2082.0437 | 2081.917 | −.1267 | −61 | 125 | 144 | QVQGGLTVFGMGQPSLS |
| | | | | | | GFR |

| | |
|---|---|
| coiled-coil domain-containing protein | gi\|3834829284 |
| [Homo sapiens] | |

[0442] Protein Group

| | |
|---|---|
| Coiled-coil domain containing 84 | gi\|116497243 |
| [Homo sapiens] | |
| Coiled-coil domain containing 84 | gi\|116496939 |
| [Homo sapiens] | |
| Coiled-coil domain containing 84 | |
| [Homo sapiens] | |
| DLNB14 [Homo sapiens] | gi\|30314481 |
| RecName: Full = Coiled-coil domain- | gi\|74714025 |
| containing protein 84 | |
| coiled-coil domain containing 84, | gi\|119587827 |
| isoform CRA_b [Homo sapiens] | |

[0443] Peptide Information

| Calc. | Obsrv. | | | | | |
|---|---|---|---|---|---|---|
| Mass | Mass | ±da | ±ppm | Start Seq. | End Seq. | Sequence |
| 818.4189 | 818.3662 | −.0527 | −64 | 150 | 156 | EMAAQIR |
| 834.4138 | 834.3577 | −.0561 | −67 | 150 | 156 | EMAAQIR |
| 846.458 | 846.3918 | −.0662 | −78 | 19 | 25 | GHVYSRK |
| 865.4447 | 865.4075 | −.0372 | −43 | 318 | 325 | TEAAAMKK |
| 940.4258 | 940.4385 | .0127 | 14 | 136 | 143 | GLDSYEEK |
| 986.5629 | 986.5446 | −.0183 | −19 | 29 | 36 | QLKEALER |
| 986.5629 | 986.5446 | −.0183 | −19 | 29 | 36 | QLKEALER |
| 1158.6664 | 1158.6343 | −.0321 | −28 | 147 | 156 | VIKEMAAQIR |
| 1546.7643 | 1546.6572 | −.1071 | −69 | 150 | 162 | EMAAQIREVEQSR |

| | |
|---|---|
| KIAA1274, isoform CRA_b | gi\|119574790 |
| [Homo sapiens] | |

[0444] Peptide Information

| Calc. | Obsrv. | | | Start | End | |
|---|---|---|---|---|---|---|
| Mass | Mass | ±da | ±ppm | Seq. | Seq. | Sequence |
| 812.4162 | 812.3501 | −.0661 | −81 | 415 | 420 | HSVWQR |
| 817.4315 | 817.3644 | −.0671 | −82 | 78 | 84 | AHYTLGR |
| 835.4308 | 835.3686 | −.0622 | −74 | 644 | 650 | EGPLTYR |
| 856.5615 | 856.4853 | −.0762 | −89 | 146 | 152 | VLQKLQK |
| 859.4567 | 859.4249 | −.0318 | −37 | 364 | 370 | MVPQGRR |
| 870.5407 | 870.5418 | .0011 | 1 | 48 | 55 | AKSIIPNK |
| 986.6146 | 986.5446 | −.07 | −71 | 592 | 599 | KVVWVSLR |
| 986.6146 | 986.5446 | −.07 | −71 | 592 | 599 | KVVWVSLR |
| 1874.9832 | 1874.8669 | −.1163 | −62 | 184 | 200 | DKQNLHENLQGLGPGVR |
| 1874.9832 | 1874.8669 | −.1163 | −62 | 184 | 200 | DKQNLHENLQGLGPGVR |
| 2067.9851 | 2067.9341 | −.051 | −25 | 651 | 666 | FQTCLTMQEVFSQHRR |
| 2082.0437 | 2081.917 | −.1297 | −61 | 125 | 144 | QVQGGLTVFGMGQPSLS |
| | | | | | | GFR |

| | |
|---|---|
| 5-azacytidine induced 1, isoform | gi\|119610037 |
| CRA_a [Homo | |
| sapiens] | |

[0445] Peptide Information

| | Obsrv. | | | Start | | |
|---|---|---|---|---|---|---|
| Calc. Mass | Mass | ±da | ±ppm | Seq. | End Seq. | Sequence |
| 817.3951 | 817.3644 | −.0307 | −38 | 15 | 21 | QAWEAGR |
| 823.358 | 823.3383 | −.0197 | −24 | 150 | 155 | QEFEDR |
| 864.4495 | 864.4102 | −.0393 | −45 | 1 | 7 | MELNTLK |
| 890.4578 | 890.4135 | −.0443 | −50 | 196 | 203 | EEAVSSLR |
| 1030.5316 | 1030.5386 | .007 | 7 | 25 | 32 | EEAWLLNR |
| 1030.5316 | 1030.5386 | .007 | 7 | 25 | 32 | EEAWLLNR |
| 1158.6266 | 1158.6343 | .0077 | 7 | 24 | 32 | KEEAWLLNR |
| 1251.7056 | 1251.5988 | −.1068 | −85 | 45 | 54 | DKEIELVIHR |
| 1889.9022 | 1889.8698 | −.0324 | −17 | 99 | 115 | CSELKGQLGEAEG |
| | | | | | | ENLR |

| | |
|---|---|
| RBM25 protein [Homo sapiens] | gi\|83405045 |

[0446] Peptide Information

| | Obsrv. | | | Start | | |
|---|---|---|---|---|---|---|
| Calc. Mass | Mass | ±da | ±ppm | Seq. | End Seq. | Sequence |
| 802.4529 | 802.3769 | −.076 | −95 | 118 | 125 | RVQGASGK |
| 803.4158 | 803.3585 | −.0573 | −71 | 284 | 289 | FRDTHK |
| 805.4236 | 805.3542 | −.0694 | −86 | 98 | 104 | ASDMLIR |
| 807.4359 | 807.3569 | −.079 | −98 | 241 | 246 | KEDIFR |
| | 807.3569 | | | | | |
| 821.4185 | 821.3503 | −.0682 | −83 | 98 | 104 | ASDMLIR |
| 835.4421 | 835.3686 | −.0735 | −88 | 242 | 247 | EDIFRR |
| 865.489 | 865.4075 | −.0815 | −94 | 70 | 77 | DHPGLKAK |
| 870.5407 | 870.5418 | .0011 | 1 | 209 | 216 | GAIEVLIR |
| 1889.9215 | 1889.8698 | −.0517 | −27 | 119 | 135 | VQGASGKLQAFG |
| | | | | | | FCEYK |

| | |
|---|---|
| RNA binding motif protein 25, isoform CRA_d | gi\|119601495 |
| [Homo sapiens] | |

[0447] Peptide Information

| | Obsrv. | | | | | |
|---|---|---|---|---|---|---|
| Calc. Mass | Mass | ±da | ±ppm | Start Seq. | End Seq. | Sequence |
| 802.4529 | 802.3769 | −.076 | −95 | 118 | 125 | RVQGASGK |
| 803.4158 | 803.3585 | −.0573 | −71 | 284 | 289 | FRDTHK |
| 805.4236 | 805.3542 | −.0694 | −86 | 98 | 104 | ASDMLIR |
| 807.4359 | 807.3569 | −.079 | −98 | 241 | 246 | KEDIFR |
| 821.4185 | 821.3503 | −.0682 | −83 | 98 | 104 | ASDMLIR |
| 835.4421 | 835.3686 | −.0735 | −88 | 242 | 247 | EDIFRR |
| 865.489 | 865.4075 | −.0815 | −94 | 70 | 77 | DHPGLKAK |
| 870.5407 | 870.5418 | .0011 | 1 | 209 | 216 | GAIEVLIR |
| 1889.9215 | 1889.8698 | −.0517 | −27 | 119 | 135 | VQGASGKLQA |
| | | | | | | FGFCEYK |

| | |
|---|---|
| unnamed protein product [Homo sapiens] | gi\|40982502 |

[0448] Peptide Information

| Calc. Mass | Obsrv. Mass | ±da | ±ppm | Start | End | Sequence |
|---|---|---|---|---|---|---|
| 804.3304 | 804.3864 | .056 | 70 | 93 | 98 | TMHEDR |
| 806.3751 | 806.3377 | −.0374 | −46 | 82 | 88 | DSSREGR |
| 892.463 | 892.4081 | −.0549 | −62 | 1 | 7 | MCVLELK |
| 1003.4857 | 1003.5687 | .083 | 83 | 86 | 92 | EGRYHWR |
| 1003.4857 | 1003.5687 | .083 | 83 | 86 | 92 | EGRYHWR |
| 2473.2771 | 2473.0869 | −.1902 | −77 | 8 | 28 | DARLLSPCSFPLF |
| | | | | | | NLMFF |
| | | | | | | GIK |

| | |
|---|---|
| tartrate-resistant acid phosphatase peak 1 | gi\|262924 |
| isoform 16 kda subunit, TRAcP peak 1 | |
| {N-terminal} [human, | |
| spleen, Peptide Partial, 21 aa] | |

[0449] Peptide Information

| Calc. | Obsrv. | | | Start | End | |
|---|---|---|---|---|---|---|
| Mass | Mass | ±da | ±ppm | Seq. | Seq. | Sequence |
| 808.4087 | 808.3834 | −.0253 | −31 | 15 | 21 | EDYVLVA |
| 875.4985 | 875.4634 | −.0351 | −40 | 1 | 7 | TQLSWLK |
| 1003.5934 | 1003.5687 | −.0247 | −25 | 1 | 8 | TQLSWLKK |
| 1003.5934 | 1003.5687 | −.0247 | −25 | 1 | 8 | TQLSWLKK |

| | |
|---|---|
| PRO2472 [Homo | gi\|7959907 |
| sapiens] | |

| Calc. Mass | Obsrv. Mass | ±da | ±ppm | Start | End | Sequence |
|---|---|---|---|---|---|---|
| 804.4509 | 804.3864 | −.0645 | −80 | 72 | 77 | RILSCR |
| 846.468 | 846.3918 | −.0762 | −90 | 90 | 97 | LTVPSSSR |
| 986.5319 | 986.5446 | .0127 | 13 | 83 | 89 | WVRSPWR |
| 986.6145 | 986.5446 | −.0699 | −71 | 78 | 85 | LLATKWVR |
| 2068.0718 | 2067.9341 | −.1377 | −67 | 2 | 20 | QPTLSAVSSCTA |
| | | | | | | PPRPR |
| | | | | | | SR |

| | |
|---|---|
| unnamed protein product [Homo sapiens] | gi\|40976300 |

[0450] Peptide Information

| | | | | | En | |
|---|---|---|---|---|---|---|
| Calc. Mass | Obsrv. | ±da | ±ppm | Start Seq. | Seq. | Sequence |
| 805.3774 | 805.3542 | −.0232 | −29 | 49 | 54 | HSQFMR |
| 821.3723 | 821.3503 | −.022 | −27 | 49 | 54 | HSQFMR |
| 986.4829 | 986.5446 | .0617 | 63 | 62 | 69 | YDQYVVSI |
| 986.4829 | 986.5446 | .0617 | 63 | 62 | 69 | YDQYVVSI |
| 1321.6252 | 1321.6519 | .0267 | 20 | 49 | 58 | HSQFMRLCAR |
| 1874.9834 | 1874.8669 | −.1165 | −62 | 16 | 31 | VYSPTFLALR |
| | | | | | | GSCLYK |
| 1874.9834 | 1874.8669 | −.1165 | −62 | 16 | 31 | VYSPTFLALR |
| | | | | | | GSCLYK |

| | |
|---|---|
| hCG1991338 [Homo sapiens] | gi\|119610487 |

[0451] Peptide Information

| Calc. Mass | Obsrv. Mass | ±da | ±ppm | Start | End | Sequence |
|---|---|---|---|---|---|---|
| 804.4509 | 804.3864 | −.0645 | −80 | 72 | 77 | RILSCR |
| 846.468 | 846.3918 | −.0762 | −90 | 90 | 97 | LTVPSSSR |
| 986.5319 | 986.5446 | .0127 | 13 | 83 | 89 | WVRSPWR |
| 986.6145 | 986.5446 | −.0699 | −71 | 78 | 85 | LLATKWVR |
| 2068.0718 | 2067.9341 | −.1377 | −67 | 2 | 20 | QPTLSAVSSCTAP |
| | | | | | | PRPR |
| | | | | | | SR |

| | | | |
|---|---|---|---|
| | 66/C15 | | Instr./Gel |
| | | | Origin |
| | [1] Sample Project | | Instrument |
| | 20110503 | | Sample |
| | | | Name |
| Protein Name- | KH14 (SEQ ID NO. KH14 | Accession No. | |

| | |
|---|---|
| unnamed protein product [Homo sapiens] | gi\|194391084 |

[0452] Peptide Information

| Calc. Mass | Obsrv. Mass | ±da | ±ppm | Start | End | Sequence |
|---|---|---|---|---|---|---|
| 861.407 | 861.411 | .004 | 5 | 251 | 257 | ICVGCPR |
| 861.407 | 861.411 | .004 | 5 | 251 | 257 | ICVGCPR |
| 1003.5684 | 1003.5685 | .0001 | 0 | 176 | 184 | QVVAGLNFR |
| 1003.5684 | 1003.5685 | .0001 | 0 | 176 | 184 | QVVAGLNFR |
| 1030.5356 | 1030.5359 | .0003 | 0 | 305 | 312 | YFIDFVAR |
| 1030.5356 | 1030.5359 | .0003 | 0 | 305 | 312 | YFIDFVAR |
| 1158.6306 | 1158.6351 | .0045 | 4 | 304 | 312 | KYFIDFVAR |
| 1251.5892 | 1251.5962 | .007 | 6 | 53 | 63 | TVGSDTFYSFK |
| 1321.653 | 1321.6416 | −.0114 | −9 | 90 | 102 | AATGECTATVGKR |
| 1514.6581 | 1514.6576 | −.0005 | 0 | 78 | 89 | TWQDCEYKDAAK |
| 1784.8741 | 1784.8611 | −.013 | −7 | 53 | 67 | TVGSDTFYSFKYEIK |
| 1874.8781 | 1874.863 | −.0151 | −8 | 32 | 46 | YNSQNQSNNQFV |
| | | | | | | LYR |
| 1874.8781 | 1874.863 | −.0151 | −8 | 32 | 46 | YNSQNQSNNQFV |
| | | | | | | LYR |
| 2139.0815 | 2139.1006 | .0191 | 9 | 258 | 276 | DIPTNSPELEETLT |
| | | | | | | HTITK |
| 2441.1038 | 2441.0813 | −.0225 | −9 | 208 | 228 | SLWNGDTGECTD |
| | | | | | | NAYIDI |
| | | | | | | QLR |
| 2512.2178 | 2512.2595 | .0417 | 17 | 229 | 250 | IASFSQNCDIYPGK |
| | | | | | | DFVQ |
| | | | | | | PPTK |

| | |
|---|---|
| kininogen 1, isoform CRA_a [Homo sapiens] | gi\|119598585 |

[0453] Protein Group

| | |
|---|---|
| Kininogen 1 [Homo sapiens] | gi\|37748641 |
| kininogen 1 variant [Homo sapiens] | gi\|62898910 |
| kininogen 1, isoform CRA_a [Homo sapiens] | gi\|119598587 |
| kininogen [Homo sapiens] | gi\|386853 |
| kininogen [Homo sapiens] | gi\|28932976 |
| kininogen-1 isoform 2 [Homo sapiens] | gi\|4504893 |
| prepro alpha-2-thiol proteinase inhibitor [Homo sapiens] | gi\|177890 |
| unnamed protein product [Homo sapiens] | gi\|213506121 |
| unnamed protein product [Homo sapiens] | gi\|213506103 |
| unnamed protein product [Homo sapiens] | gi\|207100681 |
| unnamed protein product [Homo sapiens] | gi\|207100663 |
| unnamed protein product [Homo sapiens] | gi\|189054825 |
| unnamed protein product [Homo sapiens] | gi\|158255114 |
| unnamed protein product [Homo sapiens] | |

[0454] Peptide Information

| | | | | Start | End | |
|---|---|---|---|---|---|---|
| Calc. Mass | Obsrv. Mass | ±da | ±ppm | Seq. | Seq. | Sequence |
| 861.407 | 861.411 | .004 | 5 | 263 | 269 | ICVGCPR |
| 861.407 | 861.411 | .004 | 5 | 263 | 269 | ICVGCPR |
| 1003.5684 | 1003.5685 | .0001 | 0 | 188 | 196 | QVVAGLNFR |
| 1003.5684 | 1003.5685 | .0001 | 0 | 188 | 196 | QVVAGLNFR |
| 1030.5356 | 1030.5359 | .0003 | 0 | 317 | 324 | YFIDFVAR |
| 1030.5356 | 1030.5359 | .0003 | 0 | 317 | 324 | YFIDFVAR |
| 1158.6306 | 1158.6351 | .0045 | 4 | 316 | 324 | KYFIDFVAR |
| 1251.5892 | 1251.5962 | .007 | 6 | 65 | 75 | TVGSDTFYSFK |
| 1321.653 | 1321.6416 | −.0114 | −9 | 102 | 114 | AATGECTATVGKR |
| 1514.6581 | 1514.6576 | −.0005 | 0 | 90 | 101 | TWQDCEYKDAAK |
| 1784.8741 | 1784.8611 | −.013 | −7 | 65 | 79 | TVGSDTFYSFKYEIK |
| 1874.8781 | 1874.863 | −.0151 | −8 | 44 | 58 | YNSQNQSNNQFV |
| | | | | | | LYR |
| 1874.8781 | 1874.863 | −.0151 | −8 | 44 | 58 | YNSQNQSNNQFV |
| | | | | | | LYR |
| 2139.0815 | 2139.1006 | .0191 | 9 | 270 | 288 | DIPTNSPELEETLT |
| | | | | | | HTITK |
| 2441.1038 | 2441.0813 | −.0225 | −9 | 220 | 240 | SLWNGDTGECTD |
| | | | | | | NAYIDI |
| | | | | | | QLR |
| 2512.2178 | 2512.2595 | .0417 | 17 | 241 | 262 | IASFSQNCDIYPGK |
| | | | | | | DFVQ |
| | | | | | | PPTK |

[0455] Protein Group

| | |
|---|---|
| RecName: Full = Kininogen-1; AltName: | gi\|124056474 |
| Full = Alpha-2-thiol proteinase | |
| inhibitor; AltName: Full = Fitzgerald | |
| factor; AltName: Full = High | |
| molecular weight kininogen; | |
| Short = HMWK; | |
| AltName: | |
| Full = Williams-Fitzgerald-Flaujeac | |
| factor; Contains: RecName: | |
| Full = Kininogen-1 heavy chain; | |
| Contains: RecName: Full = T-kinin; | |
| AltName: | |
| Full = Ile-Ser- | |
| Bradykinin; Contains: | |
| RecName: | |
| Full = Bradykinin; AltName: Full = Kallidin I; Contains: | |
| RecName: Full = Lysyl- | |
| bradykinin; AltName: | |
| Full = Kallidin | |
| II; Contains: RecName: Full = Kininogen-1 light chain; | |
| Contains: RecName: Full = Low | |
| molecular weight growth- | |
| promoting factor; Flags: | |
| Precursor | |
| kininogen 1, isoform CRA_b [Homo sapiens] | gi\|119598586 |
| kininogen 1, isoform | |
| CRA_b [Homo sapiens] | |
| kininogen [Homo sapiens] | gi\|386852 |
| kininogen-1 isoform 1 [Homo sapiens] | gi\|156231037 |
| unnamed protein product [Homo sapiens] | gi\|298886629 |
| unnamed protein product [Homo sapiens] | gi\|194383526 |

[0456] Peptide Information

| | Obsrv. | | | | End | |
|---|---|---|---|---|---|---|
| Calc. Mass | Mass | ±da | ±ppm | Start Seq. | Seq. | Sequence |
| 861.407 | 861.411 | .004 | 5 | 263 | 269 | ICVGCPR |
| 861.407 | 861.411 | .004 | 5 | 263 | 269 | ICVGCPR |
| 1003.5684 | 1003.5685 | .0001 | 0 | 188 | 196 | QVVAGLNFR |
| 1003.5684 | 1003.5685 | .0001 | 0 | 188 | 196 | QVVAGLNFR |
| 1030.5356 | 1030.5359 | .0003 | 0 | 317 | 324 | YFIDFVAR |
| 1030.5356 | 1030.5359 | .0003 | 0 | 317 | 324 | YFIDFVAR |
| 1158.6306 | 1158.6351 | .0045 | 4 | 316 | 324 | KYFIDFVAR |
| 1251.5892 | 1251.5962 | .007 | 6 | 65 | 75 | TVGSDTFYSFK |
| 1321.653 | 1321.6416 | −.0114 | −9 | 102 | 114 | AATGECTATVG |
| | | | | | | KR |
| 1514.6581 | 1514.6576 | −.0005 | 0 | 90 | 101 | TWQDCEYKDA |
| | | | | | | AK |
| 1784.8741 | 1784.8611 | −.013 | −7 | 65 | 79 | TVGSDTFYSFK |
| | | | | | | YEIK |
| 1874.8781 | 1874.863 | −.0151 | −8 | 44 | 58 | YNSQNQSNNQ |
| | | | | | | FVLYR |
| 1874.8781 | 1874.863 | −.0151 | −8 | 44 | 58 | YNSQNQSNNQ |
| | | | | | | FVLYR |
| 2139.0815 | 2139.1006 | .0191 | 9 | 270 | 288 | DIPTNSPELEET |
| | | | | | | LTHTITK |
| 2441.1038 | 2441.0813 | −.0225 | −9 | 220 | 240 | SLWNGDTGEC |
| | | | | | | TDNAYIDI |
| | | | | | | QLR |
| 2512.2178 | 2512.2595 | .0417 | 17 | 241 | 262 | IASFSQNCDIYP |
| | | | | | | GKDFVQ |
| | | | | | | PPTK |

| | |
|---|---|
| kininogen-1 isoform 3 [Homo sapiens] | gi\|262050546 |

[0457] Peptide Information

| | | | | Start | | |
|---|---|---|---|---|---|---|
| Calc. Mass | Obsrv. Mass | ±da | ±ppm | Seq. | End Seq. | Sequence |
| 861.407 | 861.411 | .004 | 5 | 227 | 233 | ICVGCPR |
| 861.407 | 861.411 | .004 | 5 | 227 | 233 | ICVGCPR |
| 1030.5356 | 1030.5359 | .0003 | 0 | 281 | 288 | YFIDFVAR |
| 1030.5356 | 1030.5359 | .0003 | 0 | 281 | 288 | YFIDFVAR |
| 1158.6306 | 1158.6351 | .0045 | 4 | 280 | 288 | KYFIDFVAR |
| 1251.5892 | 1251.5962 | .007 | 6 | 65 | 75 | TVGSDTFYSFK |
| 1321.653 | 1321.6416 | −.0114 | −9 | 102 | 114 | AATGECTATV |
| | | | | | | GKR |
| 1514.6581 | 1514.6576 | −.0005 | 0 | 90 | 101 | TWQDCEYKDA |
| | | | | | | AK |
| 1784.8741 | 1784.8611 | −.013 | −7 | 65 | 79 | TVGSDTFYSFK |
| | | | | | | YEIK |
| 1874.8781 | 1874.863 | −.0151 | −8 | 44 | 58 | YNSQNQSNNQ |
| | | | | | | FVLYR |
| 1874.8781 | 1874.863 | −.0151 | −8 | 44 | 58 | YNSQNQSNNQ |
| | | | | | | FVLYR |
| 2139.0815 | 2139.1006 | .0191 | 9 | 234 | 252 | DIPTNSPELEE |
| | | | | | | TLTHTITK |
| 2512.2178 | 2512.2595 | .0417 | 17 | 205 | 226 | IASFSQNCDIY |
| | | | | | | PGKDFVQ |
| | | | | | | PPTK |

| | |
|---|---|
| KNG1 protein [Homo sapiens] | gi\|116283732 |

[0458] Peptide Information

| | Obsrv. | | | Start | | |
|---|---|---|---|---|---|---|
| Calc. Mass | Mass | ±da | ±ppm | Seq. | End Seq. | Sequence |
| 861.407 | 861.411 | .004 | 5 | 127 | 133 | ICVGCPR |
| 861.407 | 861.411 | .004 | 5 | 127 | 133 | ICVGCPR |
| 1003.5684 | 1003.5685 | .0001 | 0 | 52 | 60 | QVVAGLNFR |
| 1003.5684 | 1003.5685 | .0001 | 0 | 52 | 60 | QVVAGLNFR |
| 1030.5356 | 1030.5359 | .0003 | 0 | 181 | 188 | YFIDFVAR |
| 1030.5356 | 1030.5359 | .0003 | 0 | 181 | 188 | YFIDFVAR |
| 1158.6306 | 1158.6351 | .0045 | 4 | 180 | 188 | KYFIDFVAR |
| 2139.0815 | 2139.1006 | .0191 | 9 | 134 | 152 | DIPTNSPELEETLT |
| | | | | | | HTITK |
| 2441.1038 | 2441.0813 | −.0225 | −9 | 84 | 104 | SLWNGDTGECTD |
| | | | | | | NAYIDI |
| | | | | | | QLR |
| 2512.2178 | 2512.2595 | .0417 | 17 | 105 | 126 | IASFSQNCDIYPGK |
| | | | | | | DFVQ |
| | | | | | | PPTK |

| | |
|---|---|
| unnamed protein product [Homo sapiens] | gi\|11191031 |

[0459] Peptide Information

| | Obsrv. | | | Start | | |
|---|---|---|---|---|---|---|
| Calc. Mass | Mass | ±da | ±ppm | Seq. | End Seq. | Sequence |
| 813.4213 | 813.3471 | −.0742 | −91 | 58 | 65 | DGQLAGPR |
| 857.4515 | 857.424 | −.0275 | −32 | 112 | 117 | YYVKER |
| 865.3785 | 865.4213 | .0428 | 49 | 232 | 239 | TESALTED |
| 870.5083 | 870.5385 | .0302 | 35 | 109 | 115 | LGKYYVK |
| 986.491 | 986.5446 | .0536 | 54 | 1 | 8 | MPLGHIMR |
| 986.491 | 986.5446 | .0536 | 54 | 1 | 8 | MPLGHIMR |
| 2095.9429 | 2095.9539 | .011 | 5 | 206 | 222 | YAMTVWYFDAEE |
| | | | | | | RAEAK |
| 2473.2551 | 2473.0913 | −.1638 | −66 | 173 | 192 | SFIADVEPIFDRLL |
| | | | | | | FFWSDR |
| 2473.2551 | 2473.0913 | −.1638 | −66 | 173 | 192 | SFIADVEPIFDRLL |
| | | | | | | FFWSDR |

| | |
|---|---|
| egl nine homolog 3 (C. elegans) | gi\|119586333 |
| [Homo sapiens] | |

[0460] Protein Group

| | |
|---|---|
| EGLN3 protein [Homo sapiens] | gi\|130267189 |
| EGLN3 protein [Homo sapiens] | gi\|14547150 |
| EGLN3 protein [Homo sapiens] | |
| Egl nine homolog 3 (C. elegans) [Homo sapiens] | gi\|127798639 |
| Egl nine homolog 3 (C. elegans) [Homo sapiens] | gi\|127796436 |
| Egl nine homolog 3 (C. elegans) [Homo sapiens] | gi\|77748083 |
| RecName: Full = Egl nine homolog 3; AltName: | gi\|32129515 |
| Full = HPH-1; AltName: Full = Hypoxia- | |
| inducible factor prolyl hydroxylase 3; | |
| Short = HIF-PH3; Short = HIF- | |
| prolyl | |
| hydroxylase 3; Short = HPH-3; AltName: Full = Prolyl | |
| hydroxylase domain-containing | |
| protein 3; Short = PHD3 | |
| egl nine homolog 3 [Homo sapiens] | gi\|11545787 |
| unnamed protein product [Homo | gi\|10437756 |
| sapiens] | |
| unnamed protein product [Homo sapiens] | gi\|40216521 |
| unnamed protein product [Homo sapiens] | gi\|25897867 |
| unnamed protein product [Homo sapiens] | gi\|193784739 |

[0461] Peptide Information

| | | | | Start | End | |
|---|---|---|---|---|---|---|
| Calc. Mass | Obsrv. Mass | ±da | ±ppm | Seq. | Seq. | Sequence |
| 813.4213 | 813.3471 | −.0742 | −91 | 58 | 65 | DGQLAGPR |
| 857.4515 | 857.424 | −.0275 | −32 | 112 | 117 | YYVKER |
| 865.3785 | 865.4213 | .0428 | 49 | 232 | 239 | TESALTED |
| 870.5083 | 870.5385 | .0302 | 35 | 109 | 115 | LGKYYVK |
| 986.491 | 986.5446 | .0536 | 54 | 1 | 8 | MPLGHIMR |
| 986.491 | 986.5446 | .0536 | 54 | 1 | 8 | MPLGHIMR |
| 2095.9429 | 2095.9539 | .011 | 5 | 206 | 222 | YAMTVWYFDAEE |
| | | | | | | RAEAK |
| 2473.2551 | 2473.0913 | −.1638 | −66 | 173 | 192 | SFIADVEPIFDRLL |
| | | | | | | FFWSDR |
| 2473.2551 | 2473.0913 | −.1638 | −66 | 173 | 192 | SFIADVEPIFDRLL |
| | | | | | | FFWSDR |
| | 2473.0913 | | | | | |

| | |
|---|---|
| unnamed protein product [Homo sapiens] | gi\|40976466 |

[0462] Peptide Information

| | | | | Start | | |
|---|---|---|---|---|---|---|
| Calc. Mass | Obsrv. Mass | ±da | ±ppm | Seq. | End Seq. | Sequence |
| 818.4553 | 818.3741 | −.0812 | −99 | 13 | 18 | LLERCK |
| 824.376 | 824.3765 | .0005 | 1 | 19 | 24 | YWPACK |
| 1784.7479 | 1784.8611 | .1132 | 63 | 25 | 39 | NGDECAYHHPISP |
| | | | | | | CK |
| 1858.0103 | 1857.8372 | −.1731 | −93 | 1 | 16 | MSELSVAQKPEKL |
| | | | | | | LER |
| 2081.9531 | 2081.9285 | −.0246 | −12 | 59 | 75 | YDAKCTKPDCPFT |
| | | | | | | HVSR |
| 2081.9531 | 2081.9285 | −.0246 | −12 | 59 | 75 | YDAKCTKPDCPFT |
| | | | | | | HVSR |

| | |
|---|---|
| unnamed protein product [Homo sapiens] | gi\|40977232 |

[0463] Peptide Information

| | | | | Start | | |
|---|---|---|---|---|---|---|
| Calc. Mass | Obsrv. Mass | ±da | ±ppm | Seq. | End Seq. | Sequence |
| 1002.5102 | 1002.5437 | .0335 | 33 | 55 | 63 | APEETIQSK |
| 1030.4888 | 1030.5359 | .0471 | 46 | 2 | 9 | VSHTFHMR |
| 1030.4888 | 1030.5359 | .0471 | 46 | 2 | 9 | VSHTFHMR |
| 1161.5293 | 1161.455 | −.0743 | −64 | 1 | 9 | MVSHTFHMR |
| 1889.8665 | 1889.8593 | −.0072 | −4 | 80 | 96 | VTSPSPQQNPSSP |
| | | | | | | SWQY |
| 1889.8665 | 1889.8593 | −.0072 | −4 | 80 | 96 | VTSPSPQQNPSSP |
| | | | | | | SWQY |

| | |
|---|---|
| mitochondrial NADP(+)-dependent malic enzyme 3 | gi\|37904424 |
| [Homo sapiens] | |

[0464] Peptide Information

| | Obsrv. | | | Start | End | |
|---|---|---|---|---|---|---|
| Calc. Mass | Mass | ±da | ±ppm | Seq. | Seq. | Sequence |
| 861.4802 | 861.411 | −.0692 | −80 | 186 | 192 | HQRVHGK |
| 861.4802 | 861.411 | −.0692 | −80 | 186 | 192 | HQRVHGK |
| 865.4414 | 865.4213 | −.0201 | −23 | 2 | 8 | AFTLEER |
| 1012.4768 | 1012.5323 | .0555 | 55 | 1 | 8 | MAFTLEER |
| 1030.5139 | 1030.5359 | .022 | 21 | 31 | 37 | IMRYYER |
| 1030.5139 | 1030.5359 | .022 | 21 | 31 | 37 | IMRYYER |
| 1889.8474 | 1889.8593 | .0119 | 6 | 193 | 208 | AYDDLLDEFMQAVTDK |
| 1889.8474 | 1889.8593 | .0119 | 6 | 193 | 208 | AYDDLLDEFMQAVTDK |
| 2067.8535 | 2067.8975 | .044 | 21 | 234 | 249 | NKYCMFNDDIQDDFSR |
| 2096.0693 | 2095.9539 | −.1154 | −55 | 38 | 54 | QQSDLDKYIILMTLQDR |

| | |
|---|---|
| unnamed protein product [Homo sapiens] | gi\|193786868 |

[0465] Peptide Information

| | Obsrv. | | | Start | End | |
|---|---|---|---|---|---|---|
| Calc. Mass | Mass | ±da | ±ppm | Seq. | Seq. | Sequence |
| 806.4189 | 806.3558 | −.0631 | −78 | 38 | 44 | VMQIGSR |
| 815.4734 | 815.3965 | −.0769 | −94 | 195 | 201 | LVQVNSR |
| 865.4414 | 865.4213 | −.0201 | −23 | 2 | 9 | QYIGEGAK |
| 1012.4768 | 1012.5323 | .0555 | 55 | 1 | 9 | MQYIGEGAK |
| 1030.4412 | 1030.5359 | .0947 | 92 | 14 | 20 | ECQYQFR |
| 1030.4412 | 1030.5359 | .0947 | 92 | 14 | 20 | ECQYQFR |
| 1784.7278 | 1784.8611 | .1333 | 75 | 266 | 277 | CHCKFHWCCYVK |
| 2487.1497 | 2487.0925 | −.0572 | −23 | 202 | 222 | FNSPTTQDLVYIDP |
| | | | | | | SPDY |
| | | | | | | CVR |
| 2500.9658 | 2501.1904 | .2246 | 90 | 239 | 259 | TSEGMDGCELMC |
| | | | | | | CGRG |
| | | | | | | YDQFK |

| | |
|---|---|
| Br140 [Homo sapiens] | gi\|190352 |

[0466] Peptide Information

| | | | | Start | End | |
|---|---|---|---|---|---|---|
| Calc. Mass | Obsrv. Mass | ±da | ±ppm | Seq. | Seq. | Sequence |
| 815.437 | 815.3965 | −.0405 | −50 | 723 | 730 | EQGGAVVR |
| 848.3679 | 848.3872 | .0193 | 23 | 569 | 575 | NCDQVGR |
| 861.3883 | 861.411 | .0227 | 26 | 990 | 996 | NDCSLPR |
| 861.3883 | 861.411 | .0227 | 26 | 990 | 996 | NDCSLPR |
| 875.4468 | 875.4574 | .0106 | 12 | 793 | 800 | LDEVNASK |
| 986.52 | 986.5446 | .0246 | 25 | 1058 | 1066 | GVGHSMVRK |
| 986.5206 | 986.5446 | .024 | 24 | 1153 | 1159 | TWQWLPR |
| 1003.5101 | 1003.5685 | .0584 | 58 | 319 | 326 | RCLQSPSR |
| 1003.5101 | 1003.5685 | .0584 | 58 | 319 | 326 | RCLQSPSR |
| 1158.5637 | 1158.6351 | .0714 | 62 | 137 | 147 | ENTETPAATPK |
| 1211.6532 | 1211.7167 | .0635 | 52 | 711 | 720 | DTIFYRAAVR |
| 1874.8927 | 1874.863 | −.0297 | −16 | 837 | 854 | HGPSSRGSLTPHP |
| | | | | | | AACDK |
| 1874.8927 | 1874.863 | −.0297 | −16 | 837 | 854 | HGPSSRGSLTPHP |
| | | | | | | AACDK |
| 2096.1362 | 2095.9539 | −.1823 | −87 | 1111 | 1129 | EGMFHHGVPIPVP |
| | | | | | | PLEVLK |
| 2512.3203 | 2512.2595 | −.0608 | −24 | 1108 | 1129 | MPREGMFHHGVPI |
| | | | | | | PVPP |
| | | | | | | LEVLK |

| | |
|---|---|
| DYNC2H1 variant protein [Homo sapiens] | gi\|166788546 |

[0467] Peptide Information

| | | | | Start | End | |
|---|---|---|---|---|---|---|
| Calc. Mass | Obsrv. Mass | ±da | ±ppm | Seq. | Seq. | Sequence |
| 804.421 | 804.391 | −.03 | −37 | 3603 | 3609 | KADSQQK |
| 806.4076 | 806.3558 | −.0518 | −64 | 436 | 441 | ELMLER |
| 815.4522 | 815.3965 | −.0557 | −68 | 2614 | 2620 | GLIHYGR |
| 818.4254 | 818.3741 | −.0513 | −63 | 1183 | 1189 | LQSEVDK |
| 820.3584 | 820.3719 | .0135 | 16 | 123 | 128 | DQEWSR |
| 827.4443 | 827.3964 | −.0479 | −58 | 3008 | 3014 | MPPDVIR |
| 844.4774 | 844.3963 | −.0811 | −96 | 522 | 528 | DLLDQLK |
| 848.4658 | 848.3872 | −.0786 | −93 | 1994 | 2001 | AALCKTGK |
| 861.4862 | 861.411 | −.0752 | −87 | 1307 | 1313 | CLLQSLK |
| 861.4862 | 861.411 | −.0752 | −87 | 1307 | 1313 | CLLQSLK |
| 873.4689 | 873.3854 | −.0835 | −96 | 714 | 719 | QQQRWK |
| 875.4985 | 875.4574 | −.0411 | −47 | 3623 | 3630 | SWAVATLK |
| 985.5287 | 985.5172 | −.0115 | −12 | 1629 | 1635 | QLRFYMK |
| 1002.5102 | 1002.5437 | .0335 | 33 | 3422 | 3429 | LLQQEEDK |
| 1003.524 | 1003.5685 | .0445 | 44 | 2075 | 2083 | LLTMPSGER |
| 1003.524 | 1003.5685 | .0445 | 44 | 2075 | 2083 | LLTMPSGER |
| 1012.5462 | 1012.5323 | −.0139 | −14 | 2684 | 2691 | GYELKQFK |
| 1158.5824 | 1158.6351 | .0527 | 45 | 1173 | 1182 | VEEHSVMTVK |
| 1514.7383 | 1514.6576 | −.0807 | −53 | 3023 | 3035 | LMGIFDTSWVSMK |
| 1546.728 | 1546.6423 | −.0857 | −55 | 3023 | 3035 | LMGIFDTSWVSMK |
| 1546.728 | 1546.6423 | −.0857 | −55 | 3023 | 3035 | LMGIFDTSWVSMK |
| 1857.9963 | 1857.8372 | −.1591 | −86 | 1399 | 1413 | NSLLTILDQLQRC |
| | | | | | | QR |
| 1874.787 | 1874.863 | .076 | 41 | 2803 | 2817 | CQVLWMEGWSNS |
| | | | | | | SMK |
| 1874.9569 | 1874.863 | −.0939 | −50 | 859 | 874 | EWIVIGQVDMEAL |
| | | | | | | VEK |
| 2068.0974 | 2067.8975 | −.1999 | −97 | 1854 | 1870 | ELLTPQQHYDWG |
| | | | | | | LRALK |
| 2081.9858 | 2081.9285 | −.0573 | −28 | 1015 | 1030 | WDKFELMMESHQ |
| | | | | | | LMIK |
| 2081.9858 | 2081.9285 | −.0573 | −28 | 1015 | 1030 | WDKFELMMESHQ |
| | | | | | | LMIK |
| 2441.0806 | 2441.0813 | .0007 | 0 | 2929 | 2950 | QDEADAALQMITV |
| | | | | | | SMQD |
| | | | | | | ASEQK |
| 2473.197 | 2473.0913 | −.1057 | −43 | 4123 | 4142 | CPLAWQSKWEGP |
| | | | | | | EDPL |
| | | | | | | QYLR |
| 2473.2258 | 2473.0913 | −.1345 | −54 | 168 | 188 | GILTPSDEFQFWIE |
| | | | | | | QAHR |
| | | | | | | GNK |
| 2501.2671 | 2501.1904 | −.0767 | −31 | 3374 | 3396 | NPNPFIPPDAASIV |
| | | | | | | TEVNF |
| | | | | | | TTTR |
| 2512.1956 | 2512.2595 | .0639 | 25 | 1018 | 1037 | FELMMESHQLMIK |
| | | | | | | DQIEV |
| | 2512.2595 | | | | | MK |

| | |
|---|---|
| PREDICTED: putative zinc finger protein | gi\|239752112 |
| ENSP00000328166-like, partial [Homo sapiens] | |

[0468] Peptide Information

| | | | | Start | End | |
|---|---|---|---|---|---|---|
| Calc. Mass | Obsrv. Mass | ±da | ±ppm | Seq. | Seq. | Sequence |
| 825.3923 | 825.3739 | −.0184 | −22 | 268 | 273 | LNEYMR |
| 827.324 | 827.3964 | .0724 | 88 | 311 | 316 | FEECDK |
| 904.5073 | 904.4672 | −.0401 | −44 | 31 | 37 | KKPWSMK |
| 1012.4516 | 1012.5323 | .0807 | 80 | 2 | 9 | DVMSQNYR |
| 1015.6259 | 1015.5489 | −.077 | −76 | 377 | 385 | SLGLTIQKR |
| 1175.4821 | 1175.4708 | −.0113 | −10 | 1 | 9 | MDVMSQNYR |
| 1211.6532 | 1211.7167 | .0635 | 52 | 413 | 422 | IVHTGEKHYK |
| 1514.7791 | 1514.6576 | −.1215 | −80 | 401 | 412 | AFYWSLSFTKHK |
| 2096.0078 | 2095.9539 | −.0539 | −26 | 93 | 111 | VQEGGYNGLNQC |
| | | | | | | LSITQ |
| | | | | | | SK |
| 2138.9668 | 2139.1006 | .1338 | 63 | 283 | 300 | CEECGKTFMQPS |
| | | | | | | GLTLHK |

| | |
|---|---|
| cytoplasmic dynein 2 heavy chain 1 isoform 2 | gi\|122937398 |
| [Homo sapiens] | |

[0469] Peptide Information

| | | | | Start | End | |
|---|---|---|---|---|---|---|
| Calc. Mass | Obsrv. Mass | ±da | ±ppm | Seq. | Seq. | Sequence |
| 804.421 | 804.391 | −.03 | −37 | 3610 | 3616 | KADSQQK |
| 806.4076 | 806.3558 | −.0518 | −64 | 436 | 441 | ELMLER |
| 815.4522 | 815.3965 | −.0557 | −68 | 2614 | 2620 | GLIHYGR |
| 818.4254 | 818.3741 | −.0513 | −63 | 1183 | 1189 | LQSEVDK |
| 820.3584 | 820.3719 | .0135 | 16 | 123 | 128 | DQEWSR |
| 827.4443 | 827.3964 | −.0479 | −58 | 3008 | 3014 | MPPDVIR |
| 844.4774 | 844.3963 | −.0811 | −96 | 522 | 528 | DLLDQLK |
| 848.4658 | 848.3872 | −.0786 | −93 | 1994 | 2001 | AALCKTGK |
| 861.4862 | 861.411 | −.0752 | −87 | 1307 | 1313 | CLLQSLK |
| 861.4862 | 861.411 | −.0752 | −87 | 1307 | 1313 | CLLQSLK |
| 873.4689 | 873.3854 | −.0835 | −96 | 714 | 719 | QQQRWK |
| 875.4985 | 875.4574 | −.0411 | −47 | 3630 | 3637 | SWAVATLK |
| 985.5287 | 985.5172 | −.0115 | −12 | 1629 | 1635 | QLRFYMK |
| 1002.5102 | 1002.5437 | .0335 | 33 | 3429 | 3436 | LLQQEEDK |
| 1003.524 | 1003.5685 | .0445 | 44 | 2075 | 2083 | LLTMPSGER |
| | 1003.5685 | | | | | |
| 1003.524 | 1003.5685 | .0445 | 44 | 2075 | 2083 | LLTMPSGER |
| 1012.5462 | 1012.5323 | −.0139 | −14 | 2684 | 2691 | GYELKQFK |
| 1158.5824 | 1158.6351 | .0527 | 45 | 1173 | 1182 | VEEHSVMTVK |
| 1514.7383 | 1514.6576 | −.0807 | −53 | 3023 | 3035 | LMGIFDTSWVSMK |
| 1546.728 | 1546.6423 | −.0857 | −55 | 3023 | 3035 | LMGIFDTSWVSMK |
| 1546.728 | 1546.6423 | −.0857 | −55 | 3023 | 3035 | LMGIFDTSWVS |
| | | | | | | MK |
| 1874.787 | 1874.863 | .076 | 41 | 2803 | 2817 | CQVLWMEGWS |
| | | | | | | NSSMK |
| 1874.9569 | 1874.863 | −.0939 | −50 | 859 | 874 | EWIVIGQVDME |
| | | | | | | ALVEK |
| 2068.0974 | 2067.8975 | −.1999 | −97 | 1854 | 1870 | ELLTPQQHYD |
| | | | | | | WGLRALK |
| 2081.9858 | 2081.9285 | −.0573 | −28 | 1015 | 1030 | WDKFELMMES |
| | | | | | | HQLMIK |
| 2081.9858 | 2081.9285 | −.0573 | −28 | 1015 | 1030 | WDKFELMMES |
| | | | | | | HQLMIK |
| 2441.0806 | 2441.0813 | .0007 | 0 | 2929 | 2950 | QDEADAALQMI |
| | | | | | | TVSMQD |
| | | | | | | ASEQK |
| 2473.197 | 2473.0913 | −.1057 | −43 | 4130 | 4149 | CPLAWQSKWE |
| | | | | | | GPEDPL |
| | | | | | | QYLR |
| 2473.2258 | 2473.0913 | −.1345 | −54 | 168 | 188 | GILTPSDEFQF |
| | | | | | | WIEQAHR |
| | | | | | | GNK |
| 2501.2671 | 2501.1904 | −.0767 | −31 | 3381 | 3403 | NPNPFIPPDAA |
| | | | | | | SIVTEVNF |
| | | | | | | TTTR |
| 2512.1956 | 2512.2595 | .0639 | 25 | 1018 | 1037 | FELMMESHQL |
| | | | | | | MIKDQIEV MK |

| | |
|---|---|
| hCG2040266 [Homo sapiens] | gi\|119604633 |

[0470] Peptide Information

| | | | | Start | End | |
|---|---|---|---|---|---|---|
| Calc. Mass | Obsrv. Mass | ±da | ±ppm | Seq. | Seq. | Sequence |
| 875.3788 | 875.4574 | .0786 | 90 | 104 | 111 | HSRSTACG |
| 1012.5646 | 1012.5323 | −.0323 | −32 | 98 | 106 | LSTVGRHSR |
| 1514.7598 | 1514.6576 | −.1022 | −67 | 6 | 18 | TNQPTWQNPISTK |
| 1857.9454 | 1857.8372 | −.1082 | −58 | 6 | 21 | TNQPTWQNPISTK |
| | | | | | | NTK |
| 2455.1865 | 2455.1028 | −.0837 | −34 | 49 | 68 | VVGCCLLTPKCHT |
| | | | | | | PPLYH |
| | | | | | | MR |

| | |
|---|---|
| TRM1 tRNA methyltransferase 1 homolog | gi\|119604754 |
| (S. cerevisiae), isoform | |
| CRA_d [Homo sapiens] | |

[0471] Peptide Information

| | | | | Start | End | |
|---|---|---|---|---|---|---|
| Calc. Mass | Obsrv. Mass | ±da | ±ppm | Seq. | Seq. | Sequence |
| 811.3515 | 811.3621 | .0106 | 13 | 42 | 47 | ANCYQR |
| 875.3853 | 875.4574 | .0721 | 82 | 276 | 283 | EDANPSSR |
| 901.456 | 901.4146 | −.0414 | −46 | 215 | 222 | VSLSHACK |
| 1012.5244 | 1012.5323 | .0079 | 8 | 16 | 24 | YGAMALKSR |
| | 1012.5323 | | | | | |
| 1251.7208 | 1251.5962 | −.1246 | −100 | 63 | 73 | VFVRVFTGQAK |
| 1857.9752 | 1857.8372 | −.138 | −74 | 33 | 47 | IVLHSLDLRANCY |
| | | | | | | QR |
| 1874.943 | 1874.863 | −.08 | −43 | 223 | 239 | NAVKTDAPASALW |
| | | | | | | DIMR |
| 1874.943 | 1874.863 | −.08 | −43 | 223 | 239 | NAVKTDAPASALW |
| | | | | | | DIMR |

| | |
|---|---|
| unnamed protein product [Homo sapiens] | gi\|194375826 |

[0472] Peptide Information

| | | | | Start | End | |
|---|---|---|---|---|---|---|
| Calc. Mass | Obsrv. Mass | ±da | ±ppm | Seq. | Seq. | Sequence |
| 848.3679 | 848.3872 | .0193 | 23 | 569 | 575 | NCDQVGR |
| 861.3883 | 861.411 | .0227 | 26 | 895 | 901 | NDCSLPR |
| 861.3883 | 861.411 | .0227 | 26 | 895 | 901 | NDCSLPR |
| 875.4468 | 875.4574 | .0106 | 12 | 793 | 800 | LDEVNASK |
| 986.52 | 986.5446 | .0246 | 25 | 963 | 971 | GVGHSMVRK |
| 986.5206 | 986.5446 | .024 | 24 | 1058 | 1064 | TWQWLPR |
| 1003.5101 | 1003.5685 | .0584 | 58 | 319 | 326 | RCLQSPSR |
| 1003.5101 | 1003.5685 | .0584 | 58 | 319 | 326 | RCLQSPSR |
| 1158.5637 | 1158.6351 | .0714 | 62 | 137 | 147 | ENTETPAATPK |
| 1211.6532 | 1211.7167 | .0635 | 52 | 711 | 720 | DTIFYRAAVR |
| 1874.8927 | 1874.863 | −.0297 | −16 | 837 | 854 | HGPSSRGSLTPHP |
| | | | | | | AACDK |
| 1874.8927 | 1874.863 | −.0297 | −16 | 837 | 854 | HGPSSRGSLTPHP |
| | | | | | | AACDK |
| 2096.1362 | 2095.9539 | −.1823 | −87 | 1016 | 1034 | EGMFHHGVPIPVP |
| | | | | | | PLEVLK |
| 2512.3203 | 2512.2595 | −.0608 | −24 | 1013 | 1034 | MPREGMFHHGVPI |
| | | | | | | PVPP |
| | | | | | | LEVLK |

| | |
|---|---|
| bromodomain and PHD finger containing, 1, | gi\|119584376 |
| isoform CRA_a [Homo sapiens] | |

[0473] Peptide Information

| | | | | Start | End | |
|---|---|---|---|---|---|---|
| Calc. Mass | Obsrv. Mass | ±da | ±ppm | Seq. | Seq. | Sequence |
| 875.4985 | 875.4574 | −.0411 | −47 | 87 | 93 | LPEWYR |
| 986.5206 | 986.5446 | .024 | 24 | 453 | 459 | TWQWLPR |
| 986.5206 | 986.5446 | .024 | 24 | 453 | 459 | TWQWLPR |
| 1158.5637 | 1158.6351 | .0714 | 62 | 48 | 58 | ENTETPAATPK |
| 1211.6532 | 1211.7167 | .0635 | 52 | 257 | 266 | DTIFYRAAVR |
| 1875.9131 | 1875.8636 | −.0495 | −26 | 2 | 17 | SYAQAQRMVEVD |
| | | | | | | LHGR |
| 2096.1362 | 2095.9539 | −.1823 | −87 | 411 | 429 | EGMFHHGVPIPVP |
| | | | | | | PLEVLK |
| 2455.2036 | 2455.1028 | −.1008 | −41 | 206 | 225 | ETVPDYLDHIK |
| | | | | | | KPMDFFT |
| | | | | | | MK |
| 2487.1936 | 2487.0925 | −.1011 | −41 | 206 | 225 | ETVPDYLDHIK |
| | | | | | | KPMDFFT |
| | | | | | | MK |
| 2512.3203 | 2512.2595 | −.0608 | −24 | 408 | 429 | MPREGMFHHG |
| | | | | | | VPIPVPP |
| | | | | | | LEVLK |

| | |
|---|---|
| wingless-type MMTV integration site family, | gi\|119585715 |
| member 5A, isoform CRA_a [Homo sapiens] | |

[0474] Protein Group

| | |
|---|---|
| hWNT5A [Homo sapiens] | gi\|348918 |

[0475] Peptide Information

| Calc. | | | | Start | End | |
|---|---|---|---|---|---|---|
| Mass | Obsrv. Mass | ±da | ±ppm | Seq. | Seq. | Sequence |
| 806.4189 | 806.3558 | −.0631 | −78 | 112 | 118 | VMQIGSR |
| 815.4734 | 815.3965 | −.0769 | −94 | 269 | 275 | LVQVNSR |
| 901.3754 | 901.4146 | .0392 | 43 | 1 | 9 | MAGSAMSSK |
| 1030.4412 | 1030.5359 | .0947 | 92 | 88 | 94 | ECQYQFR |
| 1030.4412 | 1030.5359 | .0947 | 92 | 88 | 94 | ECQYQFR |
| 1784.7278 | 1784.8611 | .1333 | 75 | 340 | 351 | CHCKFHWCCYVK |
| 2487.1497 | 2487.0925 | −.0572 | −23 | 276 | 296 | FNSPTTQDLVYIDP |
| | | | | | | SPDY |
| | | | | | | CVR |
| 2500.9658 | 2501.1904 | .2246 | 90 | 313 | 333 | TSEGMDGCELMC |
| | | | | | | CGRG |
| | | | | | | YDQFK |

| | | | |
|---|---|---|---|
| | 67/C16 | | Instr./Gel |
| | | | Origin |
| | [1] Sample Project | | Instrument |
| | 20110503 | | Sample |
| | | | Name |
| Protein Name- | KH15 (SEQ ID NO. KH15) | Accession No. | |

| | |
|---|---|
| unnamed protein product [Homo sapiens] | gi\|194391084 |

[0476] Peptide Information

| | | | | Start | End | |
|---|---|---|---|---|---|---|
| Calc. Mass | Obsrv. Mass | ±da | ±ppm | Seq. | Seq. | Sequence |
| 861.407 | 861.4113 | .0043 | 5 | 251 | 257 | ICVGCPR |
| 861.407 | 861.4113 | .0043 | 5 | 251 | 257 | ICVGCPR |
| 1003.5684 | 1003.5698 | .0014 | 1 | 176 | 184 | QVVAGLNFR |
| 1003.5684 | 1003.5698 | .0014 | 1 | 176 | 184 | QVVAGLNFR |
| 1030.5356 | 1030.5361 | .0005 | 0 | 305 | 312 | YFIDFVAR |
| 1030.5356 | 1030.5361 | .0005 | 0 | 305 | 312 | YFIDFVAR |
| 1158.6306 | 1158.632 | .0014 | 1 | 304 | 312 | KYFIDFVAR |
| 1158.6306 | 1158.632 | .0014 | 1 | 304 | 312 | KYFIDFVAR |
| 1251.5892 | 1251.5927 | .0035 | 3 | 53 | 63 | TVGSDTFYSFK |
| 1321.653 | 1321.6509 | −.0021 | −2 | 90 | 102 | AATGECTATVG |
| | | | | | | KR |
| 1514.6581 | 1514.6637 | .0056 | 4 | 78 | 89 | TWQDCEYKDA |
| | | | | | | AK |
| 1784.8741 | 1784.8806 | .0065 | 4 | 53 | 67 | TVGSDTFYSFK |
| | | | | | | YEIK |
| 1874.8781 | 1874.8595 | −.0186 | −10 | 32 | 46 | YNSQNQSNNQ |
| | | | | | | FVLYR |
| 1874.8781 | 1874.8595 | −.0186 | −10 | 32 | 46 | YNSQNQSNNQ |
| | | | | | | FVLYR |
| 2002.973 | 2002.9491 | −.0239 | −12 | 31 | 46 | KYNSQNQSNN |
| | | | | | | QFVLYR |
| 2139.0815 | 2139.0762 | −.0053 | −2 | 258 | 276 | DIPTNSPELEET |
| | | | | | | LTHTITK |
| 2441.1038 | 2441.1079 | .0041 | 2 | 208 | 228 | SLWNGDTGEC |
| | | | | | | TDNAYIDI |
| | | | | | | QLR |
| | | | | | | IASFSQNCDIYP |
| 2512.2178 | 2512.2356 | .0178 | 7 | 229 | 250 | GKDFVQ |
| | | | | | | PPTK |
| 2512.2178 | 2512.2356 | .0178 | 7 | 229 | 250 | IASFSQNCDIYPGKDFVQ |

kininogen 1, isoform CRA_a [Homo sapiens]

[0477] Protein Group

| | |
|---|---|
| Kininogen 1 [Homo sapiens] | gi\|37748641 |
| PPTK | |
| kininogen 1 variant [Homo sapiens] | gi\|62898910 |
| kininogen 1, isoform CRA_a [Homo sapiens] | gi\|119598587 |
| kininogen 1, isoform CRA_a [Homo sapiens] | |
| kininogen [Homo sapiens] | gi\|386853 |
| kininogen [Homo sapiens] | gi\|28932976 |
| kininogen-1 isoform 2 [Homo sapiens] | gi\|4504893 |
| prepro alpha-2-thiol proteinase inhibitor [Homo sapiens] | gi\|177890 |
| unnamed protein product [Homo sapiens] | gi\|213506121 |
| unnamed protein product [Homo sapiens] | gi\|213506103 |
| unnamed protein product [Homo sapiens] | gi\|207100681 |
| unnamed protein product [Homo sapiens] | gi\|207100663 |
| unnamed protein product [Homo sapiens] | gi\|189054825 |
| unnamed protein product [Homo sapiens] | gi\|158255114 |

[0478] Peptide Information

| | | | | Start | | |
|---|---|---|---|---|---|---|
| Calc. Mass | Obsrv. Mass | ±da | ±ppm | Seq. | End Seq. | Sequence |
| 861.407 | 861.4113 | .0043 | 5 | 263 | 269 | ICVGCPR |
| 861.407 | 861.4113 | .0043 | 5 | 263 | 269 | ICVGCPR |
| | 861.4113 | | | | | |
| 1003.5684 | 1003.5698 | .0014 | 1 | 188 | 196 | QVVAGLNFR |
| 1003.5684 | 1003.5698 | .0014 | 1 | 188 | 196 | QVVAGLNFR |
| 1030.5356 | 1030.5361 | .0005 | 0 | 317 | 324 | YFIDFVAR |
| 1030.5356 | 1030.5361 | .0005 | 0 | 317 | 324 | YFIDFVAR |
| 1158.6306 | 1158.632 | .0014 | 1 | 316 | 324 | KYFIDFVAR |
| 1158.6306 | 1158.632 | .0014 | 1 | 316 | 324 | KYFIDFVAR |
| 1251.5892 | 1251.5927 | .0035 | 3 | 65 | 75 | TVGSDTFYSFK |
| 1321.653 | 1321.6509 | −.0021 | −2 | 102 | 114 | AATGECTATVG |
| | | | | | | KR |
| 1514.6581 | 1514.6637 | .0056 | 4 | 90 | 101 | TWQDCEYKDA |
| | | | | | | AK |
| 1784.8741 | 1784.8806 | .0065 | 4 | 65 | 79 | TVGSDTFYSFK |
| | | | | | | YEIK |
| 1874.8781 | 1874.8595 | −.0186 | −10 | 44 | 58 | YNSQNQSNNQ |
| | | | | | | FVLYR |
| 1874.8781 | 1874.8595 | −.0186 | −10 | 44 | 58 | YNSQNQSNNQ |
| | | | | | | FVLYR |
| 2002.973 | 2002.9491 | −.0239 | −12 | 43 | 58 | KYNSQNQSNN |
| | | | | | | QFVLYR |
| 2139.0815 | 2139.0762 | −.0053 | −2 | 270 | 288 | DIPTNSPELEET |
| | | | | | | LTHTITK |
| 2441.1038 | 2441.1079 | .0041 | 2 | 220 | 240 | SLWNGDTGEC |
| | | | | | | TDNAYIDI |
| | | | | | | QLR |
| 2512.2178 | 2512.2356 | .0178 | 7 | 241 | 262 | IASFSQNCDIYP |
| | | | | | | GKDFVQ |
| | | | | | | PPTK |
| 2512.2178 | 2512.2356 | .0178 | 7 | 241 | 262 | IASFSQNCDIYP |
| | | | | | | GKDFVQ |
| | | | | | | PPTK |

| | |
|---|---|
| RecName: Full = Kininogen-1; AltName: | gi\|124056474 |

[0479] Protein Group

| | |
|---|---|
| Full = Alpha-2-thiol proteinase | |
| inhibitor; AltName: Full = Fitzgerald | |
| factor; AltName: Full = High | |
| molecular | |
| weight kininogen; | |
| Short = HMWK; | |
| AltName: | |
| Full = Williams-Fitzgerald-Flaujeac factor; Contains: | |
| RecName: Full = Kininogen-1 heavy | |
| chain; Contains: RecName: | |
| Full = T-kinin; AltName: | |
| Full = Ile-Ser- | |
| Bradykinin; Contains: | |
| RecName: | |
| Full = Bradykinin; AltName: Full = Kallidin I; Contains: | |
| RecName: Full = Lysyl- | |
| bradykinin; AltName: | |
| Full = Kallidin | |
| II; Contains: RecName: Full = Kininogen-1 | |
| light chain; Contains: RecName: Full = Low molecular | |
| weight growth-promoting factor; Flags: Precursor | |
| kininogen 1, isoform CRA_b [Homo sapiens] | gi\|119598586 |
| kininogen | gi\|386852 |
| [Homo sapiens] | |
| kininogen-1 isoform 1 [Homo sapiens] | gi\|156231037 |
| unnamed protein product [Homo sapiens] | gi\|298886629 |
| unnamed protein product [Homo sapiens] | gi\|194383526 |

[0480] Peptide Information

| | | | | Start | End | |
|---|---|---|---|---|---|---|
| Calc. Mass | Obsrv. Mass | ±da | ±ppm | Seq. | Seq. | Sequence |
| 861.407 | 861.4113 | .0043 | 5 | 263 | 269 | ICVGCPR |
| 861.407 | 861.4113 | .0043 | 5 | 263 | 269 | ICVGCPR |
| 1003.5684 | 1003.5698 | .0014 | 1 | 188 | 196 | QVVAGLNFR |
| 1003.5684 | 1003.5698 | .0014 | 1 | 188 | 196 | QVVAGLNFR |
| 1030.5356 | 1030.5361 | .0005 | 0 | 317 | 324 | YFIDFVAR |
| 1030.5356 | 1030.5361 | .0005 | 0 | 317 | 324 | YFIDFVAR |
| 1158.6306 | 1158.632 | .0014 | 1 | 316 | 324 | KYFIDFVAR |
| 1158.6306 | 1158.632 | .0014 | 1 | 316 | 324 | KYFIDFVAR |
| 1251.5892 | 1251.5927 | .0035 | 3 | 65 | 75 | TVGSDTFYSFK |
| 1321.653 | 1321.6509 | −.0021 | −2 | 102 | 114 | AATGECTATVGKR |
| | 1321.6509 | | | | | |
| 1514.6581 | 1514.6637 | .0056 | 4 | 90 | 101 | TWQDCEYKDAAK |
| 1784.8741 | 1784.8806 | .0065 | 4 | 65 | 79 | TVGSDTFYSFKYEIK |
| 1874.8781 | 1874.8595 | −.0186 | −10 | 44 | 58 | YNSQNQSNNQFVLYR |
| 1874.8781 | 1874.8595 | −.0186 | −10 | 44 | 58 | YNSQNQSNNQFVLYR |
| 2002.973 | 2002.9491 | −.0239 | −12 | 43 | 58 | KYNSQNQSNNQFVLYR |
| 2139.0815 | 2139.0762 | −.0053 | −2 | 270 | 288 | DIPTNSPELEETLTHTITK |
| 2441.1038 | 2441.1079 | .0041 | 2 | 220 | 240 | SLWNGDTGE |
| | | | | | | CTDNAYIDI QLR |
| 2512.2178 | 2512.23 | .0178 | 7 | 24 | 26 | IASFSQNCDIY |
| | | | | | | PPTK |
| 2512.2178 | 2512.23 | .0178 | 7 | 24 | 26 | IASFSQNCDIY |
| | 56 | | | 1 | 2 | PGKDFVO |

| | |
|---|---|
| kininogen-1 isoform 3 [Homo sapiens] | gi\|262050546 |

[0481] Peptide Information

| | | | | Start | End | |
|---|---|---|---|---|---|---|
| Calc. Mass | Obsrv. Mass | ±da | ±ppm | Seq. | Seq. | Sequence |
| 861.407 | 861.4113 | .0043 | 5 | 227 | 233 | ICVGCPR |
| 861.407 | 861.4113 | .0043 | 5 | 227 | 233 | ICVGCPR |
| 1030.5356 | 1030.5361 | .0005 | 0 | 281 | 288 | YFIDFVAR |
| 1030.5356 | 1030.5361 | .0005 | 0 | 281 | 288 | YFIDFVAR |
| 1158.6306 | 1158.632 | .0014 | 1 | 280 | 288 | KYFIDFVAR |
| 1158.6306 | 1158.632 | .0014 | 1 | 280 | 288 | KYFIDFVAR |
| 1251.5892 | 1251.5927 | .0035 | 3 | 65 | 75 | TVGSDTFYSFK |
| 1321.653 | 1321.6509 | −.0021 | −2 | 102 | 114 | AATGECTATVGKR |
| 1514.6581 | 1514.6637 | .0056 | 4 | 90 | 101 | TWQDCEYKDAAK |
| 1784.8741 | 1784.8806 | .0065 | 4 | 65 | 79 | TVGSDTFYSFKYEIK |
| 1874.8781 | 1874.8595 | −.0186 | −10 | 44 | 58 | YNSQNQSNNQFV |
| | | | | | | LYR |
| 1874.8781 | 1874.8595 | −.0186 | −10 | 44 | 58 | YNSQNQSNNQFV |
| | | | | | | LYR |
| 2002.973 | 2002.9491 | −.0239 | −12 | 43 | 58 | KYNSQNQSNNQF |
| | | | | | | VLYR |
| 2139.0815 | 2139.0762 | −.0053 | −2 | 234 | 252 | DIPTNSPELEETLT |
| | | | | | | HTITK |
| 2512.2178 | 2512.2356 | .0178 | 7 | 205 | 226 | IASFSQNCDIYPGK |
| | | | | | | DFVQ |
| | | | | | | PPTK |
| 2512.2178 | 2512.2356 | .0178 | 7 | 205 | 226 | IASFSQNCDIYPGK |
| | | | | | | DFVQ |
| | | | | | | PPTK |

| | |
|---|---|
| KNG1 protein [Homo sapiens] | gi\|116283732 |

[0482] Peptide Information

| | | | | Start | | |
|---|---|---|---|---|---|---|
| Calc. Mass | Obsrv. Mass | ±da | ±ppm | Seq. | End Seq. | Sequence |
| 861.407 | 861.4113 | .0043 | 5 | 127 | 133 | ICVGCPR |
| | 861.4113 | | | | | |
| 861.407 | 861.4113 | .0043 | 5 | 127 | 133 | ICVGCPR |
| 1003.5684 | 1003.5698 | .0014 | 1 | 52 | 60 | QVVAGLNFR |
| 1003.5684 | 1003.5698 | .0014 | 1 | 52 | 60 | QVVAGLNFR |
| 1030.5356 | 1030.5361 | .0005 | 0 | 181 | 188 | YFIDFVAR |
| 1030.5356 | 1030.5361 | .0005 | 0 | 181 | 188 | YFIDFVAR |
| 1158.6306 | 1158.632 | .0014 | 1 | 180 | 188 | KYFIDFVAR |
| 1158.6306 | 1158.632 | .0014 | 1 | 180 | 188 | KYFIDFVAR |
| 2139.0815 | 2139.0762 | −.0053 | −2 | 134 | 152 | DIPTNSPELEET |
| | | | | | | LTHTITK |
| 2441.1038 | 2441.1079 | .0041 | 2 | 84 | 104 | SLWNGDTGEC |
| | | | | | | TDNAYIDI |
| | | | | | | QLR |
| 2512.2178 | 2512.2356 | .0178 | 7 | 105 | 126 | IASFSQNCDIYP |
| | | | | | | GKDFVQ |
| | | | | | | PPTK |
| 2512.2178 | 2512.2356 | .0178 | 7 | 105 | 126 | IASFSQNCDIY |
| | | | | | | PGKDFVQ |
| | | | | | | PPTK |

| | |
|---|---|
| hCG2032408, isoform CRA_a [Homo sapiens] | gi\|119587443 |

[0483] Peptide Information

| | Obsrv. | | | Start | End | |
|---|---|---|---|---|---|---|
| Calc. Mass | Mass | ±da | ±ppm | Seq. | Seq. | Sequence |
| 801.4213 | 801.3756 | −.0457 | −57 | 678 | 684 | LQNAAER |
| 803.4006 | 803.3851 | −.0155 | −19 | 2 | 9 | ANGTADVR |
| 805.4162 | 805.3634 | −.0528 | −66 | 652 | 660 | NSKAGSGGK |
| 807.428 | 807.3718 | −.0562 | −70 | 1377 | 1383 | SIMTDIK |
| 815.4522 | 815.4123 | −.0399 | −49 | 2589 | 2595 | GLIHYGR |
| 818.4254 | 818.3859 | −.0395 | −48 | 1183 | 1189 | LQSEVDK |
| 826.3876 | 826.3891 | .0015 | 2 | 3501 | 3506 | INNMYR |
| 827.4443 | 827.395 | −.0493 | −60 | 2983 | 2989 | MPPDVIR |
| 844.4774 | 844.4187 | −.0587 | −70 | 522 | 528 | DLLDQLK |
| 848.4658 | 848.4327 | −.0331 | −39 | 1976 | 1983 | AALCKTGK |
| 856.4635 | 856.4633 | −.0002 | 0 | 3282 | 3288 | THLKDSR |
| 861.4862 | 861.4113 | −.0749 | −87 | 1307 | 1313 | CLLQSLK |
| 861.4862 | 861.4113 | −.0749 | −87 | 1307 | 1313 | CLLQSLK |
| 873.4689 | 873.3929 | −.076 | −87 | 714 | 719 | QQQRWK |
| 1002.5102 | 1002.5387 | .0285 | 28 | 3411 | 3418 | LLQQEEDK |
| 1003.524 | 1003.5698 | .0458 | 46 | 2057 | 2065 | LLTMPSGER |
| 1003.524 | 1003.5698 | .0458 | 46 | 2057 | 2065 | LLTMPSGER |
| 1158.5824 | 1158.632 | .0496 | 43 | 1173 | 1182 | VEEHSVMTVK |
| 1158.5824 | 1158.632 | .0496 | 43 | 1173 | 1182 | VEEHSVMTVK |
| 1183.6616 | 1183.649 | −.0126 | −11 | 2980 | 2989 | SLRMPPDVIR |
| | 1183.649 | | | | | |
| 1514.7383 | 1514.6637 | −.0746 | −49 | 2998 | 3010 | LMGIFDTSWVSMK |
| 1546.728 | 1546.6477 | −.0803 | −52 | 2998 | 3010 | LMGIFDTSWVSMK |
| 1546.728 | 1546.6477 | −.0803 | −52 | 2998 | 3010 | LMGIFDTSWVSMK |
| 1857.9963 | 1857.8433 | −.153 | −82 | 1399 | 1413 | NSLLTILDQLQRCQR |
| 1874.787 | 1874.8595 | .0725 | 39 | 2778 | 2792 | CQVLWMEGWSNSSMK |
| 1874.9569 | 1874.8595 | −.0974 | −52 | 859 | 874 | EWIVIGQVDMEALVEK |
| 2002.882 | 2002.9491 | .0671 | 34 | 2778 | 2793 | CQVLWMEGWSNSSMKK |
| 2068.0974 | 2067.9004 | −.197 | −95 | 1842 | 1858 | ELLTPQQHYDWGLRALK |
| 2081.9858 | 2081.9248 | −.061 | −29 | 1015 | 1030 | WDKFELMMESHQLMIK |
| 2441.0806 | 2441.1079 | .0273 | 11 | 2904 | 2925 | QDEADAALQ |
| | | | | | | MITVSMQD |
| | | | | | | ASEQK |
| 2473.2258 | 2473.0701 | −.1557 | −63 | 168 | 188 | GILTPSDEFQF |
| | | | | | | WIEQAHR GNK |
| 2473.2258 | 2473.0701 | −.1557 | −63 | 168 | 188 | GILTPSDEFQF |
| | | | | | | WIEQAHR GNK |
| 2512.1956 | 2512.2356 | .04 | 16 | 1018 | 1037 | FELMMESHQL |
| | | | | | | MIKDQIEV MK |
| 2512.1956 | 2512.235 | .0 | 1 | 10 | 103 | FELMMESHQL |
| | | | | | | MK |

| | |
|---|---|
| unnamed protein product [Homo sapiens] | gi\|40976466 |

[0484] Peptide Information

| | | | | Start | | |
|---|---|---|---|---|---|---|
| Calc. Mass | Obsrv. Mass | ±da | ±ppm | Seq. | End Seq. | Sequence |
| 818.4553 | 818.3859 | −.0694 | −85 | 13 | 18 | LLERCK |
| 824.376 | 824.4156 | .0396 | 48 | 19 | 24 | YWPACK |
| 1784.7479 | 1784.8806 | .1327 | 74 | 25 | 39 | NGDECAYHHPISP |
| | | | | | | CK |
| 1858.0103 | 1857.8433 | −.167 | −90 | 1 | 16 | MSELSVAQKPEKL |
| | | | | | | LER |
| 2081.9531 | 2081.9248 | −.0283 | −14 | 59 | 75 | YDAKCTKPDCPFT |
| | | | | | | HVSR |

| | |
|---|---|
| homeobox protein [Homo sapiens] | gi\|7414351 |

[0485] Peptide Information

| | | | | Start | End | |
|---|---|---|---|---|---|---|
| Calc. Mass | Obsrv. Mass | ±da | ±ppm | Seq. | Seq. | Sequence |
| 800.3897 | 800.3841 | −.0056 | −7 | 43 | 50 | APSESGPR |
| 824.4083 | 824.4156 | .0073 | 9 | 426 | 431 | RCPYTK |
| 827.437 | 827.395 | −.042 | −51 | 458 | 464 | SVHLTDR |
| 844.4635 | 844.4187 | −.0448 | −53 | 353 | 359 | SEPSIRR |
| 863.4522 | 863.4113 | −.0409 | −47 | 468 | 473 | IWFQNR |
| 922.5217 | 922.4904 | −.0313 | −34 | 120 | 127 | LAHQLGQR |
| 1002.6207 | 1002.5387 | −.082 | −82 | 81 | 88 | IQHVLHKK |
| | 1002.5387 | | | | | |
| 1003.5009 | 1003.5698 | .0689 | 69 | 133 | 139 | WWWRGGR |
| 1003.5009 | 1003.5698 | .0689 | 69 | 133 | 139 | WWWRGGR |
| 1875.9196 | 1875.8578 | −.0618 | −33 | 403 | 420 | DSLGNSK |
| | | | | | | GENAANWLTAK |
| 2002.9805 | 2002.9491 | −.0314 | −16 | 1 | 20 | MPGPPPA |
| | | | | | | TLGSPHSSPF |
| | | | | | | GPR |
| 2082.0959 | 2081.9248 | −.1711 | −82 | 301 | 318 | LLRPTRPPRAMAAGGCWR |

| | |
|---|---|
| Br140 [Homo sapiens] | gi\|190352 |

[0486] Peptide Information

| | | | | Start | | |
|---|---|---|---|---|---|---|
| Calc. Mass | Obsrv. Mass | ±da | ±ppm | Seq. | End Seq. | Sequence |
| 800.4373 | 800.3841 | −.0532 | −66 | 67 | 73 | QSRPANK |
| 814.4094 | 814.4108 | .0014 | 2 | 711 | 716 | DTIFYR |
| 815.437 | 815.4123 | −.0247 | −30 | 723 | 730 | EQGGAVVR |
| 848.4658 | 848.4327 | −.0331 | −39 | 814 | 820 | KEMTALR |
| 861.3883 | 861.4113 | .023 | 27 | 990 | 996 | NDCSLPR |
| 861.3883 | 861.4113 | .023 | 27 | 990 | 996 | NDCSLPR |
| 986.52 | 986.5446 | .0246 | 25 | 1058 | 1066 | GVGHSMVRK |
| 986.5206 | 986.5446 | .024 | 24 | 1153 | 1159 | TWQWLPR |
| 1003.5101 | 1003.5698 | .0597 | 59 | 319 | 326 | RCLQSPSR |
| 1003.5101 | 1003.5698 | .0597 | 59 | 319 | 326 | RCLQSPSR |
| 1158.5637 | 1158.632 | .0683 | 59 | 137 | 147 | ENTETPAATPK |
| 1158.5637 | 1158.632 | .0683 | 59 | 137 | 147 | ENTETPAATPK |
| 1211.6532 | 1211.7495 | .0963 | 79 | 711 | 720 | DTIFYRAAVR |
| 1874.8927 | 1874.8595 | −.0332 | −18 | 837 | 854 | HGPSSRGSLTP |
| | | | | | | HPAACDK |
| 1874.8927 | 1874.8595 | −.0332 | −18 | 837 | 854 | HGPSSRGSLTP |
| | | | | | | HPAACDK |
| 2096.1362 | 2095.9319 | −.2043 | −97 | 1111 | 1129 | EGMFHHGVPIP |
| | | | | | | VPPLEVLK |
| 2512.3203 | 2512.2356 | −.0847 | −34 | 1108 | 1129 | MPREGMFHHG |
| | | | | | | VPIPVPP |
| | | | | | | LEVLK |
| 2512.3203 | 2512.2356 | −.0847 | −34 | 1108 | 1129 | MPREGMFHHG |
| | | | | | | VPIPVPP |
| | | | | | | LEVLK |

| | |
|---|---|
| coiled-coil alpha-helical rod protein 1 | gi\|168985836 |
| [Homo sapiens] | |

[0487] Protein Group

| | |
|---|---|
| coiled-coil alpha-helical rod protein 1 [Homo sapiens] | gi\|168985398 |
| coiled-coil alpha-helical rod protein 1 [Homo sapiens] | |
| coiled-coil alpha-helical rod protein 1 [Homo sapiens] | i\|168984995 |
| coiled-coil alpha-helical rod protein 1 [Homo sapiens] | gi\|123287162 |
| coiled-coil alpha-helical rod protein 1 [Homo sapiens] | gi\|220860570 |

[0488] Peptide Information

| | | | | Start | | |
|---|---|---|---|---|---|---|
| Calc. Mass | Obsrv. Mass | ±da | ±ppm | Seq. | End Seq. | Sequence |
| 803.4257 | 803.3851 | −.0406 | −51 | 92 | 98 | VAEVETR |
| 818.3638 | 818.3859 | .0221 | 27 | 22 | 28 | EQGEAER |
| 873.4788 | 873.3929 | −.0859 | −98 | 144 | 150 | LQEEARK |
| 1030.5527 | 1030.5361 | −.0166 | −16 | 160 | 167 | LQELERDK |
| 1030.5527 | 1030.5361 | −.0166 | −16 | 160 | 167 | LQELERDK |
| 1211.761 | 1211.7495 | −.0115 | −9 | 174 | 184 | LLTVLPSLLDK |
| 2003.0543 | 2002.9491 | −.1052 | −53 | 215 | 233 | GSLSVLLDDLQDL |
| | | | | | | SEAISK |
| 2486.9817 | 2487.0879 | .1062 | 43 | 234 | 255 | EEAVCQGDNLDR |
| | | | | | | CSSSN |
| | | | | | | PQMSS |

| | |
|---|---|
| KIAA0615 protein [Homo sapiens] | gi\|40788302 |

[0489] Peptide Information

| | | | | Start | | |
|---|---|---|---|---|---|---|
| Calc. Mass | Obsrv. Mass | ±da | ±ppm | Seq. | End Seq. | Sequence |
| 814.4669 | 814.4108 | −.0561 | −69 | 512 | 518 | TVPIEQK |
| 839.4118 | 839.3781 | −.0337 | −40 | 557 | 564 | GASSHQPR |
| 844.4134 | 844.4187 | .0053 | 6 | 682 | 687 | KFFSCR |
| 986.5417 | 986.5446 | .0029 | 3 | 179 | 186 | SHIQQFVK |
| 986.5417 | 986.5446 | .0029 | 3 | 179 | 186 | SHIQQFVK |
| 1002.5466 | 1002.5387 | −.0079 | −8 | 287 | 296 | AGTPVSELTK |
| 1003.6186 | 1003.5698 | −.0488 | −49 | 649 | 656 | IPYKLELK |
| 1003.6186 | 1003.5698 | −.0488 | −49 | 649 | 656 | IPYKLELK |
| 1158.6226 | 1158.632 | .0094 | 8 | 64 | 73 | AELLEQSRGR |
| 1158.6226 | 1158.632 | .0094 | 8 | 64 | 73 | AELLEQSRGR |
| 1321.5988 | 1321.6509 | .0521 | 39 | 496 | 506 | VEAKPCTSNCR |
| 1514.7122 | 1514.6637 | −.0485 | −32 | 14 | 28 | EGPTPPDWLGSS |
| | | | | | | GSK |
| 1784.8563 | 1784.8806 | .0243 | 14 | 11 | 28 | GGREGPTPPDWL |
| | | | | | | GSSG |
| | | | | | | SK |
| 2512.3018 | 2512.2356 | −.0662 | −26 | 565 | 586 | VPLFPENGLHQQP |
| | | | | | | EPLLP |
| | | | | | | NNMK |
| 2512.3018 | 2512.2356 | −.0662 | −26 | 565 | 586 | VPLFPENGLHQQP |
| | | | | | | EPLLP |
| | | | | | | NNMK |

| | |
|---|---|
| DYNC2H1 variant protein [Homo sapiens] | gi\|166788546 |

[0490] Peptide Information

| | | | | Start | | |
|---|---|---|---|---|---|---|
| Calc. Mass | Obsrv. Mass | ±da | ±ppm | Seq. | End Seq. | Sequence |
| 801.4213 | 801.3756 | −.0457 | −57 | 678 | 684 | LQNAAER |
| 803.4006 | 803.3851 | −.0155 | −19 | 2 | 9 | ANGTADVR |
| 804.421 | 804.384 | −.037 | −46 | 3603 | 3609 | KADSQQK |
| 805.4162 | 805.3634 | −.0528 | −66 | 652 | 660 | NSKAGSGGK |
| 807.428 | 807.3718 | −.0562 | −70 | 1377 | 1383 | SIMTDIK |
| 815.4522 | 815.4123 | −.0399 | −49 | 2614 | 2620 | GLIHYGR |
| 818.4254 | 818.3859 | −.0395 | −48 | 1183 | 1189 | LQSEVDK |
| 826.3876 | 826.3891 | .0015 | 2 | 3512 | 3517 | INNMYR |
| 827.4443 | 827.395 | −.0493 | −60 | 3008 | 3014 | MPPDVIR |
| 844.4774 | 844.4187 | −.0587 | −70 | 522 | 528 | DLLDQLK |
| 848.4658 | 848.4327 | −.0331 | −39 | 1994 | 2001 | AALCKTGK |
| 856.4635 | 856.4633 | −.0002 | 0 | 3293 | 3299 | THLKDSR |
| 861.4862 | 861.4113 | −.0749 | −87 | 1307 | 1313 | CLLQSLK |
| 861.4862 | 861.4113 | −.0749 | −87 | 1307 | 1313 | CLLQSLK |
| | 861.4113 | | | | | |
| 873.4689 | 873.3929 | −.076 | −87 | 714 | 719 | QQQRWK |
| 1002.5102 | 1002.5387 | .0285 | 28 | 3422 | 3429 | LLQQEEDK |
| 1003.524 | 1003.5698 | .0458 | 46 | 2075 | 2083 | LLTMPSGER |
| 1003.524 | 1003.5698 | .0458 | 46 | 2075 | 2083 | LLTMPSGER |
| 1158.5824 | 1158.632 | .0496 | 43 | 1173 | 1182 | VEEHSVMTVK |
| 1158.5824 | 1158.632 | .0496 | 43 | 1173 | 1182 | VEEHSVMTVK |
| 1183.6616 | 1183.649 | −.0126 | −11 | 3005 | 3014 | SLRMPPDVIR |
| 1514.7383 | 1514.6637 | −.0746 | −49 | 3023 | 3035 | LMGIFDTSWVS |
| | | | | | | MK |
| 1546.728 | 1546.6477 | −.0803 | −52 | 3023 | 3035 | LMGIFDTSWVS |
| | | | | | | MK |
| 1546.728 | 1546.6477 | −.0803 | −52 | 3023 | 3035 | LMGIFDTSWVS |
| | | | | | | MK |
| 1857.9963 | 1857.8433 | −.153 | −82 | 1399 | 1413 | NSLLTILDQLQ |
| | | | | | | RCQR |
| 1874.787 | 1874.8595 | .0725 | 39 | 2803 | 2817 | CQVLWMEGW |
| | | | | | | SNSSMK |
| 1874.9569 | 1874.8595 | −.0974 | −52 | 859 | 874 | EWIVIGQVDME |
| | | | | | | ALVEK |
| 2002.882 | 2002.9491 | .0671 | 34 | 2803 | 2818 | CQVLWMEGW |
| | | | | | | SNSSMKK |
| 2068.0974 | 2067.9004 | −.197 | −95 | 1854 | 1870 | ELLTPQQHYD |
| | | | | | | WGLRALK |
| 2081.9858 | 2081.9248 | −.061 | −29 | 1015 | 1030 | WDKFELMMES |
| | | | | | | HQLMIK |
| 2441.0806 | 2441.1079 | .0273 | 11 | 2929 | 2950 | QDEADAALQMI |
| | | | | | | TVSMQD |
| | | | | | | ASEQK |
| 2473.197 | 2473.0701 | −.1269 | −51 | 4123 | 4142 | CPLAWQSKWE |
| | | | | | | GPEDPL |
| | | | | | | QYLR |
| 2473.2258 | 2473.0701 | −.1557 | −63 | 168 | 188 | GILTPSDEFQF |
| | | | | | | WIEQAHR |
| | | | | | | GNK |
| 2512.1956 | 2512.2356 | .04 | 16 | 1018 | 1037 | FELMMESHQL |
| | | | | | | MIKDQIEV |
| | | | | | | MK |
| 2512.1956 | 2512.2356 | .04 | 16 | 1018 | 1037 | FELMMESHQL |
| | | | | | | MIKDQIEV MK |

| | |
|---|---|
| unnamed protein product [Homo sapiens] | gi\|194375826 |

[0491] Peptide Information

| | | | | Start | End | |
|---|---|---|---|---|---|---|
| Calc. Mass | Obsrv. Mass | ±da | ±ppm | Seq. | Seq. | Sequence |
| 800.4373 | 800.3841 | −.0532 | −66 | 67 | 73 | QSRPANK |
| 814.4094 | 814.4108 | .0014 | 2 | 711 | 716 | DTIFYR |
| 848.4658 | 848.4327 | −.0331 | −39 | 814 | 820 | KEMTALR |
| 861.3883 | 861.4113 | .023 | 27 | 895 | 901 | NDCSLPR |
| 861.3883 | 861.4113 | .023 | 27 | 895 | 901 | NDCSLPR |
| 986.52 | 986.5446 | .0246 | 25 | 963 | 971 | GVGHSMVRK |
| 986.5206 | 986.5446 | .024 | 24 | 1058 | 1064 | TWQWLPR |
| 1003.5101 | 1003.5698 | .0597 | 59 | 319 | 326 | RCLQSPSR |
| 1003.5101 | 1003.5698 | .0597 | 59 | 319 | 326 | RCLQSPSR |
| 1158.5637 | 1158.632 | .0683 | 59 | 137 | 147 | ENTETPAATPK |
| 1158.5637 | 1158.632 | .0683 | 59 | 137 | 147 | ENTETPAATPK |
| 1211.6532 | 1211.7495 | .0963 | 79 | 711 | 720 | DTIFYRAAVR |
| 1874.8927 | 1874.8595 | −.0332 | −18 | 837 | 854 | HGPSSRGSLT |
| | | | | | | PHPAACDK |
| 1874.8927 | 1874.8595 | −.0332 | −18 | 837 | 854 | HGPSSRGSLT |
| | | | | | | PHPAACDK |
| 2096.1362 | 2095.9319 | −.2043 | −97 | 1016 | 1034 | EGMFHHGVPIP |
| | | | | | | VPPLEVLK |
| 2512.3203 | 2512.2356 | −.0847 | −34 | 1013 | 1034 | MPREGMFHHG |
| | | | | | | VPIPVPP |
| | | | | | | LEVLK |
| 2512.3203 | 2512.2356 | −.0847 | −34 | 1013 | 1034 | MPREGMFHHG |
| | | | | | | VPIPVPP |
| | | | | | | LEVLK |

| | |
|---|---|
| RREB1 protein [Homo sapiens] | gi\|124297065 |

[0492] Peptide Information

| | | | | Start | End | |
|---|---|---|---|---|---|---|
| Calc. Mass | Obsrv. Mass | ±da | ±ppm | Seq. | Seq. | Sequence |
| 805.4414 | 805.3634 | −.078 | −97 | 293 | 300 | SVASKADK |
| 814.4431 | 814.4108 | −.0323 | −40 | 358 | 364 | HAKHHGK |
| 853.3291 | 853.3855 | .0564 | 66 | 333 | 338 | CQTCER |
| 856.4886 | 856.4633 | −.0253 | −30 | 43 | 50 | NGLIPQSK |
| 873.4312 | 873.3929 | −.0383 | −44 | 209 | 215 | QEPKDEK |
| 922.4853 | 922.4904 | .0051 | 6 | 205 | 212 | AHGRQEPK |
| 1030.5099 | 1030.5361 | .0262 | 25 | 33 | 41 | HGVTTCSLR |
| 1030.5099 | 1030.5361 | .0262 | 25 | 33 | 41 | HGVTTCSLR |
| 1158.6049 | 1158.632 | .0271 | 23 | 32 | 41 | KHGVTTCSLR |
| 1158.6049 | 1158.632 | .0271 | 23 | 32 | 41 | KHGVTTCSLR |
| 1321.7012 | 1321.6509 | −.0503 | −38 | 311 | 320 | RFWSLQDLTR |
| 1514.7281 | 1514.6637 | −.0644 | −43 | 321 | 332 | HMRSHTGERPYK |

| | |
|---|---|
| hCG2032408, isoform CRA_e [Homo sapiens] | gi\|119587447 |

[0493] Peptide Information

| | Obsrv. | | | Start | End | |
|---|---|---|---|---|---|---|
| Calc. Mass | Mass | ±da | ±ppm | Seq. | Seq. | Sequence |
| 801.4213 | 801.3756 | −.0457 | −57 | 678 | 684 | LQNAAER |
| 803.4006 | 803.3851 | −.0155 | −19 | 2 | 9 | ANGTADVR |
| 805.4162 | 805.3634 | −.0528 | −66 | 652 | 660 | NSKAGSGGK |
| 807.428 | 807.3718 | −.0562 | −70 | 1377 | 1383 | SIMTDIK |
| 815.4522 | 815.4123 | −.0399 | −49 | 2589 | 2595 | GLIHYGR |
| 818.4254 | 818.3859 | −.0395 | −48 | 1183 | 1189 | LQSEVDK |
| 826.3876 | 826.3891 | .0015 | 2 | 3497 | 3502 | INNMYR |
| 827.4443 | 827.395 | −.0493 | −60 | 2983 | 2989 | MPPDVIR |
| 844.4774 | 844.4187 | −.0587 | −70 | 522 | 528 | DLLDQLK |
| 848.4658 | 848.4327 | −.0331 | −39 | 1976 | 1983 | AALCKT |
| | | | | | | GK |
| 856.4635 | 856.4633 | −.0002 | 0 | 3278 | 3284 | THLKDSR |
| 861.4862 | 861.4113 | −.0749 | −87 | 1307 | 1313 | CLLQSLK |
| 861.4862 | 861.4113 | −.0749 | −87 | 1307 | 1313 | CLLQSLK |
| 873.4689 | 873.3929 | −.076 | −87 | 714 | 719 | QQQRWK |
| 1002.5102 | 1002.5387 | .0285 | 28 | 3407 | 3414 | LLQQEE |
| | | | | | | DK |
| 1003.524 | 1003.5698 | .0458 | 46 | 2057 | 2065 | LLTMPS |
| | | | | | | GER |
| 1003.524 | 1003.5698 | .0458 | 46 | 2057 | 2065 | LLTMPSGER |
| 1158.5824 | 1158.632 | .0496 | 43 | 1173 | 1182 | VEEHSVMTVK |
| 1158.5824 | 1158.632 | .0496 | 43 | 1173 | 1182 | VEEHSVMTVK |
| 1183.6616 | 1183.649 | −.0126 | −11 | 2980 | 2989 | SLRMPPDVIR |
| 1514.7383 | 1514.6637 | −.0746 | −49 | 2998 | 3010 | LMGIFDTSWVS |
| | | | | | | MK |
| 1546.728 | 1546.6477 | −.0803 | −52 | 2998 | 3010 | LMGIFDTSWVS |
| | | | | | | MK |
| 1546.728 | 1546.6477 | −.0803 | −52 | 2998 | 3010 | LMGIFDTSWVS |
| | | | | | | MK |
| 1857.9963 | 1857.8433 | −.153 | −82 | 1399 | 1413 | NSLLTILDQLQ |
| | | | | | | RCQR |
| 1874.787 | 1874.8595 | .0725 | 39 | 2778 | 2792 | CQVLWMEGW |
| | | | | | | SNSSMK |
| 1874.9569 | 1874.8595 | −.0974 | −52 | 859 | 874 | EWIVIGQVDME |
| | | | | | | ALVEK |
| 2002.882 | 2002.9491 | .0671 | 34 | 2778 | 2793 | CQVLWMEGW |
| | | | | | | SNSSMKK |
| 2068.0974 | 2067.9004 | −.197 | −95 | 1842 | 1858 | ELLTPQQHYD |
| | | | | | | WGLRALK |
| 2081.9858 | 2081.9248 | −.061 | −29 | 1015 | 1030 | WDKFELMMES |
| | | | | | | HQLMIK |
| 2441.0806 | 2441.1079 | .0273 | 11 | 2904 | 2925 | QDEADAALQMI |
| | | | | | | TVSMQD |
| | | | | | | ASEQK |
| 2473.197 | 2473.0701 | −.1269 | −51 | 4091 | 4110 | CPLAWQSKWE |
| | | | | | | GPEDPL |
| | | | | | | QYLR |
| 2473.2258 | 2473.0701 | −.1557 | −63 | 168 | 188 | GILTPSDEFQF |
| | | | | | | WIEQAHR |
| | | | | | | GNK |
| 2512.1956 | 2512.2356 | .04 | 16 | 1018 | 1037 | FELMMESHQL |
| | | | | | | MIKDQIEV |
| | | | | | | MK |
| 2512.1956 | 2512.2356 | .04 | 16 | 1018 | 1037 | FELMMESHQL |
| | | | | | | MIKDQIEV |
| | | | | | | MK |

| | |
|---|---|
| RecName: Full = Uncharacterized protein | gi\|156630925 |
| C9orf24; | |
| AltName: Full = Testis development protein | |
| NYD-SP22 | |

[0494] Protein Group

| | |
|---|---|
| Chromosome 9 open reading frame 24 [Homo sapiens] | gi\|20809872 |
| Chromosome 9 open reading frame 24 [Homo sapiens] | |
| Chromosome 9 open reading frame 24 [Homo sapiens] | gi\|18314508 |
| chromosome 9 open reading frame 24 [Homo sapiens] | gi\|55958908 |
| chromosome 9 open reading frame 24, isoform | gi\|119578860 |
| CRA_a [Homo sapiens] | |
| testes development-related NYD-SP22 isoform 1 [Homo | gi\|21362074 |
| sapiens] | |
| unnamed protein product [Homo sapiens] | gi\|16554112 |

[0495] Peptide Information

| | Obsrv. | | | Start | End | |
|---|---|---|---|---|---|---|
| Calc. Mass | Mass | ±da | ±ppm | Seq. | Seq. | Sequence |
| 800.4124 | 800.3841 | −.0283 | −35 | 1 | 6 | MFLFSR |
| 1175.515 | 1175.4698 | −.0452 | −38 | 66 | 74 | CAVQDYTYR |
| 1251.7096 | 1251.5927 | −.1169 | −93 | 123 | 132 | YTTYLPRLPK |
| 1546.7496 | 1546.6477 | −.1019 | −66 | 8 | 20 | TRTPISTYSDSYR |
| 1546.7496 | 1546.6477 | −.1019 | −66 | 8 | 20 | TRTPISTYSDSYR |
| 2003.9565 | 2003.9475 | −.009 | −4 | 245 | 262 | NAVCCYNSPAVIL |
| | | | | | | PISEP |
| 2139.0686 | 2139.0762 | .0076 | 4 | 154 | 171 | LNAYEREVMVNML |
| | | | | | | NSLSR |
| 2441.1555 | 2441.1079 | −.0476 | −19 | 66 | 86 | CAVQDYTYRGSIS |
| | | | | | | GHPYL |
| | | | | | | PEK |

| | |
|---|---|
| MDN1, midasin homolog (yeast) [Homo sapiens] | gi\|55958030 |

[0496] Protein Group

| | |
|---|---|
| MDN1, midasin homolog (yeast) [Homo sapiens] | gi\|55958512 |

[0497] Peptide Information

| | | | | Start | End | |
|---|---|---|---|---|---|---|
| Calc. Mass | Obsrv. Mass | ±da | ±ppm | Seq. | Seq. | Sequence |
| 804.4322 | 804.384 | −.0482 | −60 | 23 | 29 | SRSELGR |
| 808.4563 | 808.3871 | −.0692 | −86 | 952 | 958 | QPIPEPK |
| 818.4366 | 818.3859 | −.0507 | −62 | 701 | 708 | SAVNKDGK |
| 824.4005 | 824.4156 | .0151 | 18 | 94 | 100 | LCVSMSK |
| 827.437 | 827.395 | −.042 | −51 | 178 | 184 | SHDTLVR |
| 828.4686 | 828.4219 | −.0467 | −56 | 464 | 470 | RPTLEGR |
| 834.4389 | 834.3736 | −.0653 | −78 | 520 | 527 | MAEVIGSK |
| 839.4522 | 839.3781 | −.0741 | −88 | 688 | 693 | WHDLLR |
| 848.5101 | 848.4327 | −.0774 | −91 | 1133 | 1139 | VLSRAFR |
| 922.5581 | 922.4904 | −.0677 | −73 | 819 | 826 | RNLPPGIR |
| 1003.524 | 1003.5698 | .0458 | 46 | 1062 | 1070 | EGVLIDAMR |
| 1003.524 | 1003.5698 | .0458 | 46 | 1062 | 1070 | EGVLIDAMR |
| 1183.6028 | 1183.649 | .0462 | 39 | 301 | 310 | SYVLVESVCK |
| 1546.7424 | 1546.6477 | −.0947 | −61 | 657 | 669 | EAFEELFAQTFSK |
| 1546.7424 | 1546.6477 | −.0947 | −61 | 657 | 669 | EAFEELFAQTFSK |
| 1784.8789 | 1784.8806 | .0017 | 1 | 1116 | 1131 | FMLFATQNPPGLYGGR |

| | |
|---|---|
| immunoglobulin heavy chain [Homo sapiens] | gi\|46253956 |

[0498] Peptide Information

| | | | | Start | End | |
|---|---|---|---|---|---|---|
| Calc. Mass | Obsrv. Mass | ±da | ±ppm | Seq. | Seq. | Sequence |
| 817.4414 | 817.4075 | −.0339 | −41 | 1 | 8 | VQSGAEVK |
| 827.4594 | 827.395 | −.0644 | −78 | 64 | 69 | RPDQRR |
| 1514.8075 | 1514.6637 | −.1438 | −95 | 40 | 54 | EHSGPGLPGQGLL |
| | | | | | | PR |
| 2441.2896 | 2441.1079 | −.1817 | −74 | 40 | 63 | EHSGPGLPGQGLL |
| | | | | | | PRTG |
| | | | | | | DGVVELR |

| | |
|---|---|
| bromodomain and PHD finger containing, 1, | gi\|119584376 |
| isoform CRA_a [Homo sapiens] | |

[0499] Peptide Information

| | Obsrv. | | | Start | End | |
|---|---|---|---|---|---|---|
| Calc. Mass | Mass | ±da | ±ppm | Seq. | Seq. | Sequence |
| 814.4094 | 814.4108 | .0014 | 2 | 257 | 262 | DTIFYR |
| 986.5206 | 986.5446 | .024 | 24 | 453 | 459 | TWQWLPR |
| 986.5206 | 986.5446 | .024 | 24 | 453 | 459 | TWQWLPR |
| 1158.5637 | 1158.632 | .0683 | 59 | 48 | 58 | ENTETPAATPK |
| 1158.5637 | 1158.632 | .0683 | 59 | 48 | 58 | ENTETPAATPK |
| 1211.6532 | 1211.7495 | .0963 | 79 | 257 | 266 | DTIFYRAAVR |
| 1875.9131 | 1875.8578 | −.0553 | −29 | 2 | 17 | SYAQAQRMVEVD |
| | | | | | | LHGR |
| 2096.1362 | 2095.9319 | −.2043 | −97 | 411 | 429 | EGMFHHGVPIPVP |
| | | | | | | PLEVLK |
| 2455.2036 | 2455.0674 | −.1362 | −55 | 206 | 225 | ETVPDYLDHIKKP |
| | | | | | | MDFFT |
| | | | | | | MK |
| 2487.1936 | 2487.0879 | −.1057 | −42 | 206 | 225 | ETVPDYLDHIKKP |
| | | | | | | MDFFT |
| | | | | | | MK |
| 2512.3203 | 2512.2356 | −.0847 | −34 | 408 | 429 | MPREGMFHHGVPI |
| | | | | | | PVPP |
| | | | | | | LEVLK |
| 2512.3203 | 2512.2356 | −.0847 | −34 | 408 | 429 | MPREGMFHHGVPI |
| | | | | | | PVPP |
| | | | | | | LEVLK |

| | |
|---|---|
| sciellin isoform b variant [Homo sapiens] | gi\|62896999 |

[0500] Peptide Information

| | Obsrv. | | | Start | End | |
|---|---|---|---|---|---|---|
| Calc. Mass | Mass | ±da | ±ppm | Seq. | Seq. | Sequence |
| 817.489 | 817.4075 | −.0815 | −100 | 2 | 8 | SNVTLRK |
| 828.4938 | 828.4219 | −.0719 | −87 | 396 | 402 | VTPEVKR |
| 832.4457 | 832.3846 | −.0611 | −73 | 336 | 342 | VNARMNK |
| 848.4407 | 848.4327 | −.008 | −9 | 336 | 342 | VNAR |
| | | | | | | MNK |
| 863.4621 | 863.4113 | −.0508 | −59 | 409 | 415 | DLNNF |
| | | | | | | IK |
| 986.5629 | 986.5446 | −.0183 | −19 | 80 | 88 | DVPKATISR |
| 986.5629 | 986.5446 | −.0183 | −19 | 80 | 88 | DVPKATISR |
| 1030.5415 | 1030.5361 | −.0054 | −5 | 251 | 259 | GEELDNLIK |
| 1030.5415 | 1030.5361 | −.0054 | −5 | 251 | 259 | GEELDNLIK |
| 1251.6368 | 1251.5927 | −.0441 | −35 | 38 | 47 | TFLQDNSWIK |
| 1514.7883 | 1514.6637 | −.1246 | −82 | 287 | 299 | AKSLESLIYMSTR |
| 1857.8656 | 1857.8433 | −.0223 | −12 | 619 | 633 | DMCTYCRKPL |
| | | | | | | GVETK |
| 1875.8915 | 1875.8578 | −.0337 | −18 | 671 | 685 | QTIHCEPCYPKI |
| | | | | | | MAK |
| 2082.0098 | 2081.9248 | −.085 | −41 | 544 | 561 | DQNLENLIEVN |
| | | | | | | SHVSENK |
| 2153.1672 | 2153.1255 | −.0417 | −19 | 521 | 539 | NNQSQDLDNLI |
| | | | | | | KVKPSALR |

| | | | |
|---|---|---|---|
| | 68/C17 | | Instr./Gel |
| | | | Origin |
| | [1] Sample Project | | Instrument |
| | 20110503 | | Sample |
| | | | Name |
| Protein Name- | KH16 (SEQ ID NO. KH16) | Accession No. | |

| | |
|---|---|
| unnamed protein product [Homo sapiens] | gi\|194391084 |

[0501] Peptide Information

| | | | | Start | End | |
|---|---|---|---|---|---|---|
| Calc. Mass | Obsrv. Mass | ±da | ±ppm | Seq. | Seq. | Sequence |
| 815.4985 | 815.4535 | −.045 | −55 | 24 | 31 | AVDAALKK |
| 861.407 | 861.4133 | .0063 | 7 | 251 | 257 | ICVGCPR |
| 861.407 | 861.4133 | .0063 | 7 | 251 | 257 | ICVGCPR |
| 1003.5684 | 1003.5696 | .0012 | 1 | 176 | 184 | QVVAGLNFR |
| 1003.5684 | 1003.5696 | .0012 | 1 | 176 | 184 | QVVAGLNFR |
| 1030.5356 | 1030.5363 | .0007 | 1 | 305 | 312 | YFIDFVAR |
| 1030.5356 | 1030.5363 | .0007 | 1 | 305 | 312 | YFIDFVAR |
| 1158.6306 | 1158.6313 | .0007 | 1 | 304 | 312 | KYFIDFVAR |
| 1251.5892 | 1251.595 | .0058 | 5 | 53 | 63 | TVGSDTFYSFK |
| 1321.653 | 1321.647 | −.006 | −5 | 90 | 102 | AATGECTATVGKR |
| 1514.6581 | 1514.6606 | .0025 | 2 | 78 | 89 | TWQDCEYKDAAK |
| 1784.8741 | 1784.8759 | .0018 | 1 | 53 | 67 | TVGSDTFYSFKYEIK |
| 1874.8781 | 1874.8535 | −.0246 | −13 | 32 | 46 | YNSQNQSNNQFV |
| | | | | | | LYR |
| 1874.8781 | 1874.8535 | −.0246 | −13 | 32 | 46 | YNSQNQSNNQFV |
| | | | | | | LYR |
| 2139.0815 | 2139.0833 | .0018 | 1 | 258 | 276 | DIPTNSPELEETLT |
| | | | | | | HTITK |
| | 2139.0833 | | | | | |
| 2441.1038 | 2441.0786 | −.0252 | −10 | 208 | 228 | SLWNGDT |
| | | | | | | GECTDNAYIDI |
| | | | | | | QLR |
| 2512.2178 | 2512.1931 | −.0247 | −10 | 229 | 250 | IASFSQNC |
| | | | | | | DIYPGKDFVQ |
| | | | | | | PPTK |
| 2512.2178 | 2512.1931 | −.0247 | −10 | 229 | 250 | IASFSQNCDIYPGKDFVQ |
| | | | | | | PPTK |

| | |
|---|---|
| kininogen 1, isoform CRA_a [Homo sapiens] | gi\|119598585 |

[0502] Protein Group

| | |
|---|---|
| Kininogen 1 [Homo sapiens] | gi\|37748641 |
| kininogen 1 variant [Homo sapiens] | gi\|62898910 |
| kininogen 1, isoform CRA_a [Homo sapiens] | gi\|119598587 |
| kininogen [Homo sapiens] | gi\|386853 |
| kininogen [Homo sapiens] | gi\|28932976 |
| kininogen [Homo sapiens] | |
| kininogen-1 isoform 2 [Homo sapiens] | gi\|4504893 |
| prepro alpha-2-thiol proteinase inhibitor [Homo sapiens] | gi\|177890 |
| unnamed protein product [Homo sapiens] | gi\|213506121 |
| unnamed protein product [Homo sapiens] | gi\|213506103 |
| unnamed protein product [Homo sapiens] | gi\|207100681 |
| unnamed protein product [Homo sapiens] | gi\|207100663 |
| unnamed protein product [Homo sapiens] | gi\|189054825 |
| unnamed protein product [Homo sapiens] | gi\|158255114 |

[0503] Peptide Information

| | | | | Start | End | |
|---|---|---|---|---|---|---|
| Calc. Mass | Obsrv. Mass | ±da | ±ppm | Seq. | Seq. | Sequence |
| 815.4985 | 815.4535 | −.045 | −55 | 36 | 43 | AVDAALKK |
| 861.407 | 861.4133 | .0063 | 7 | 263 | 269 | ICVGCPR |
| 861.407 | 861.4133 | .0063 | 7 | 263 | 269 | ICVGCPR |
| 1003.5684 | 1003.5696 | .0012 | 1 | 188 | 196 | QVVAGLNFR |
| 1003.5684 | 1003.5696 | .0012 | 1 | 188 | 196 | QVVAGLNFR |
| 1030.5356 | 1030.5363 | .0007 | 1 | 317 | 324 | YFIDFVAR |
| 1030.5356 | 1030.5363 | .0007 | 1 | 317 | 324 | YFIDFVAR |
| 1158.6306 | 1158.6313 | .0007 | 1 | 316 | 324 | KYFIDFVAR |
| 1251.5892 | 1251.595 | .0058 | 5 | 65 | 75 | TVGSDTFYSFK |
| 1321.653 | 1321.647 | −.006 | −5 | 102 | 114 | AATGECTATVGKR |
| 1514.6581 | 1514.6606 | .0025 | 2 | 90 | 101 | TWQDCEYKDAAK |
| 1784.8741 | 1784.8759 | .0018 | 1 | 65 | 79 | TVGSDTFYSFKYEIK |
| 1874.8781 | 1874.8535 | −.0246 | −13 | 44 | 58 | YNSQNQSNNQFV |
| | | | | | | LYR |
| 1874.8781 | 1874.8535 | −.0246 | −13 | 44 | 58 | YNSQNQSNNQFV |
| | | | | | | LYR |
| 2139.0815 | 2139.0833 | .0018 | 1 | 270 | 288 | DIPTNSPELEETLT |
| | | | | | | HTITK |
| 2441.1038 | 2441.0786 | −.0252 | −10 | 220 | 240 | SLWNGDTGEC |
| | | | | | | TDNAYIDI |
| | | | | | | QLR |
| 2512.2178 | 2512.1931 | −.0247 | −10 | 241 | 262 | IASFSQNCDIYP |
| | | | | | | GKDFVQ |
| | | | | | | PPTK |
| 2512.2178 | 2512.1931 | −.0247 | −10 | 241 | 262 | IASFSQNCDIYP |
| | | | | | | GKDFVQ PPTK |

| | |
|---|---|
| RecName: Full = Kininogen-1; AltName: | gi\|124056474 |

[0504] Protein Group

| | |
|---|---|
| Full = Alpha-2-thiol proteinase | |
| inhibitor; AltName: Full = Fitzgerald | |
| factor; AltName: Full = High | |
| molecular | |
| weight kininogen; | |
| Short = HMWK; | |
| AltName: | |
| Full = Williams-Fitzgerald-Flaujeac factor; Contains: | |
| RecName: Full = Kininogen-1 heavy | |
| chain; Contains: RecName: | |
| Full = T-kinin; AltName: | |
| Full = Ile-Ser- | |
| Bradykinin; Contains: | |
| RecName: | |
| Full = Bradykinin; AltName: Full = Kallidin I; Contains: | |
| RecName: Full = Lysyl- | |
| bradykinin; AltName: | |
| Full = Kallidin | |
| II; Contains: RecName: Full = Kininogen-1 light chain; | |
| Contains: RecName: Full = Low | |
| molecular weight growth- | |
| promoting factor; Flags: | |
| Precursor | |
| kininogen 1, isoform CRA_b [Homo sapiens] | gi\|119598586 |
| kininogen [Homo sapiens] | gi\|386852 |
| kininogen-1 isoform 1 [Homo sapiens] | gi\|156231037 |
| unnamed protein product [Homo sapiens] | gi\|298886629 |
| unnamed protein product [Homo sapiens] | |
| unnamed protein product [Homo sapiens] | gi\|194383526 |

[0505] Peptide Information

| | | | | Start | End | |
|---|---|---|---|---|---|---|
| Calc. Mass | Obsrv. Mass | ±da | ±ppm | Seq. | Seq. | Sequence |
| 815.4985 | 815.4535 | −.045 | −55 | 36 | 43 | AVDAALKK |
| 861.407 | 861.4133 | .0063 | 7 | 263 | 269 | ICVGCPR |
| 861.407 | 861.4133 | .0063 | 7 | 263 | 269 | ICVGCPR |
| 1003.5684 | 1003.5696 | .0012 | 1 | 188 | 196 | QVVAGLNFR |
| 1003.5684 | 1003.5696 | .0012 | 1 | 188 | 196 | QVVAGLNFR |
| 1030.5356 | 1030.5363 | .0007 | 1 | 317 | 324 | YFIDFVAR |
| 1030.5356 | 1030.5363 | .0007 | 1 | 317 | 324 | YFIDFVAR |
| 1158.6306 | 1158.6313 | .0007 | 1 | 316 | 324 | KYFIDFVAR |
| 1251.5892 | 1251.595 | .0058 | 5 | 65 | 75 | TVGSDTFYSFK |
| 1321.653 | 1321.647 | −.006 | −5 | 102 | 114 | AATGECTATVGKR |
| 1514.6581 | 1514.6606 | .0025 | 2 | 90 | 101 | TWQDCEYKDAAK |
| 1784.8741 | 1784.8759 | .0018 | 1 | 65 | 79 | TVGSDTFYSFKYEIK |
| 1874.8781 | 1874.8535 | −.0246 | −13 | 44 | 58 | YNSQNQSNNQFV |
| | | | | | | LYR |
| 1874.8781 | 1874.8535 | −.0246 | −13 | 44 | 58 | YNSQNQSNNQFV |
| | | | | | | LYR |
| 2139.0815 | 2139.0833 | .0018 | 1 | 270 | 288 | DIPTNSPELEETLT |
| | | | | | | HTITK |
| 2441.1038 | 2441.0786 | −.0252 | −10 | 220 | 240 | SLWNGDTGECTD |
| | | | | | | NAYIDI |
| | | | | | | QLR |
| 2512.2178 | 2512.1931 | −.0247 | −10 | 241 | 262 | IASFSQNCDIYPGK |
| | | | | | | DFVQ |
| | | | | | | PPTK |
| 2512.2178 | 2512.1931 | −.0247 | −10 | 241 | 262 | IASFSQNCDIYPGK |
| | | | | | | DFVQ |
| | | | | | | PPTK |

| | |
|---|---|
| kininogen-1 isoform 3 [Homo sapiens] | gi\|262050546 |

[0506] Peptide Information

| | | | | Start | End | |
|---|---|---|---|---|---|---|
| Calc. Mass | Obsrv. Mass | ±da | ±ppm | Seq. | Seq. | Sequence |
| 815.4985 | 815.4535 | −.045 | −55 | 36 | 43 | AVDAALKK |
| 861.407 | 861.4133 | .0063 | 7 | 227 | 233 | ICVGCPR |
| 861.407 | 861.4133 | .0063 | 7 | 227 | 233 | ICVGCPR |
| 1030.5356 | 1030.5363 | .0007 | 1 | 281 | 288 | YFIDFVAR |
| 1030.5356 | 1030.5363 | .0007 | 1 | 281 | 288 | YFIDFVAR |
| 1158.6306 | 1158.6313 | .0007 | 1 | 280 | 288 | KYFIDFVAR |
| 1251.5892 | 1251.595 | .0058 | 5 | 65 | 75 | TVGSDTFYSFK |
| 1321.653 | 1321.647 | −.006 | −5 | 102 | 114 | AATGECTATVGKR |
| 1514.6581 | 1514.6606 | .0025 | 2 | 90 | 101 | TWQDCEYKDAAK |
| 1784.8741 | 1784.8759 | .0018 | 1 | 65 | 79 | TVGSDTFYSFKYEIK |
| 1874.8781 | 1874.8535 | −.0246 | −13 | 44 | 58 | YNSQNQSNNQFV |
| | | | | | | LYR |
| 1874.8781 | 1874.8535 | −.0246 | −13 | 44 | 58 | YNSQNQSNNQFV |
| | | | | | | LYR |
| 2139.0815 | 2139.0833 | .0018 | 1 | 234 | 252 | DIPTNSPELEETLT |
| | | | | | | HTITK |
| 2512.2178 | 2512.1931 | −.0247 | −10 | 205 | 226 | IASFSQNCDIYPGK |
| | | | | | | DFVQ |
| | | | | | | PPTK |
| 2512.2178 | 2512.1931 | −.0247 | −10 | 205 | 226 | IASFSQNCDIYPGK |
| | | | | | | DFVQ |
| | | | | | | PPTK |

| | |
|---|---|
| KNG1 protein [Homo sapiens] | gi\|116283732 |

[0507] Peptide Information

| | | | | Start | End | |
|---|---|---|---|---|---|---|
| Calc. Mass | Obsrv. Mass | ±da | ±ppm | Seq. | Seq. | Sequence |
| 861.407 | 861.4133 | .0063 | 7 | 127 | 133 | ICVGCPR |
| 861.407 | 861.4133 | .0063 | 7 | 127 | 133 | ICVGCPR |
| 1003.5684 | 1003.5696 | .0012 | 1 | 52 | 60 | QVVAGLNFR |
| 1003.5684 | 1003.5696 | .0012 | 1 | 52 | 60 | QVVAGLNFR |
| 1030.5356 | 1030.5363 | .0007 | 1 | 181 | 188 | YFIDFVAR |
| 1030.5356 | 1030.5363 | .0007 | 1 | 181 | 188 | YFIDFVAR |
| 1158.6306 | 1158.6313 | .0007 | 1 | 180 | 188 | KYFIDFVAR |
| 2139.0815 | 2139.0833 | .0018 | 1 | 134 | 152 | DIPTNSPELEETLT |
| | | | | | | HTITK |
| 2441.1038 | 2441.0786 | −.0252 | −10 | 84 | 104 | SLWNGDTGECTD |
| | | | | | | NAYIDI |
| | | | | | | QLR |
| 2512.2178 | 2512.1931 | −.0247 | −10 | 105 | 126 | IASFSQNCDIYPGK |
| | | | | | | DFVQ |
| | | | | | | PPTK |
| 2512.2178 | 2512.1931 | −.0247 | −10 | 105 | 126 | IASFSQNCDIYPGK |
| | | | | | | DFVQ |
| | | | | | | PPTK |

| | |
|---|---|
| unnamed protein product [Homo sapiens] | gi\|193784739 |

[0508] Peptide Information

| | Obsrv. | | | Start | End | |
|---|---|---|---|---|---|---|
| Calc. Mass | Mass | ±da | ±ppm | Seq. | Seq. | Sequence |
| 823.4607 | 823.4086 | −.0521 | −63 | 2 | 8 | PLGHIMR |
| 836.4413 | 836.3985 | −.0428 | −51 | 225 | 230 | FWNLTR |
| 857.4515 | 857.4417 | −.0098 | −11 | 112 | 117 | YYVKER |
| 865.3785 | 865.4606 | .0821 | 95 | 232 | 239 | TESALTED |
| 870.5083 | 870.5379 | .0296 | 34 | 109 | 115 | LGKYYVK |
| 986.491 | 986.5456 | .0546 | 55 | 1 | 8 | MPLGHIMR |
| 986.491 | 986.5456 | .0546 | 55 | 1 | 8 | MPLGHIMR |
| 2095.9429 | 2095.9111 | −.0318 | −15 | 206 | 222 | YAMTVWYFDA |
| | | | | | | EERAEAK |
| 2473.2551 | 2473.0457 | −.2094 | −85 | 173 | 192 | SFIADVEPIFDR |
| | | | | | | LLFFWSDR |
| 2473.2551 | 2473.0457 | −.2094 | −85 | 173 | 192 | SFIADVEPIFDR |
| | | | | | | LLFFWSDR |

| | |
|---|---|
| sciellin isoform b variant [Homo sapiens] | gi\|162896999 |

[0509] Peptide Information

| | Obsrv. | | | Start | End | |
|---|---|---|---|---|---|---|
| Calc. Mass | Mass | ±da | ±ppm | Seq. | Seq. | Sequence |
| 817.489 | 817.4197 | −.0693 | −85 | 2 | 8 | SNVTLRK |
| 820.4345 | 820.3947 | −.0398 | −49 | 1 | 7 | MSNVTLR |
| 836.4294 | 836.3985 | −.0309 | −37 | 1 | 7 | MSNVTLR |
| 840.4097 | 840.4077 | −.002 | −2 | 583 | 589 | TYVENSK |
| 848.4407 | 848.4392 | −.0015 | −2 | 336 | 342 | VNARMNK |
| 860.4584 | 860.4324 | −.026 | −30 | 316 | 322 | VNQRTDK |
| 863.4621 | 863.4159 | −.0462 | −54 | 409 | 415 | DLNNFIK |
| 986.5629 | 986.5456 | −.0173 | −18 | 80 | 88 | DVPKATISR |
| 986.5629 | 986.5456 | −.0173 | −18 | 80 | 88 | DVPKATISR |
| 1030.5415 | 1030.5363 | −.0052 | −5 | 251 | 259 | GEELDNLIK |
| 1030.5415 | 1030.5363 | −.0052 | −5 | 251 | 259 | GEELDNLIK |
| 1251.6368 | 1251.595 | −.0418 | −33 | 38 | 47 | TFLQDNSWIK |
| 1514.7883 | 1514.6606 | −.1277 | −84 | 287 | 299 | AKSLESLIYMSTR |
| 1857.8656 | 1857.8317 | −.0339 | −18 | 619 | 633 | DMCTYCRKPLGV |
| | | | | | | ETK |
| 1875.8915 | 1875.8496 | −.0419 | −22 | 671 | 685 | QTIHCEPCYPKIMAK |
| 2082.0098 | 2081.9111 | −.0987 | −47 | 544 | 561 | DQNLENLIEVNSH |
| | | | | | | VSENK |
| 2153.1672 | 2153.0808 | −.0864 | −40 | 521 | 539 | NNQSQDLDNLIKV |
| | | | | | | KPSALR |

| | |
|---|---|
| unnamed protein product [Homo sapiens] | gi\|40031588 |

[0510] Protein Group

| | |
|---|---|
| chromosome 17 open reading frame 25, isoform | gi\|119611054 |
| CRA_e [Homo sapiens] | |

[0511] Peptide Information

| | Obsrv. | | | Start | End | |
|---|---|---|---|---|---|---|
| Calc. Mass | Mass | ±da | ±ppm | Seq. | Seq. | Sequence |
| 804.3846 | 804.4047 | .0201 | 25 | 167 | 172 | DEEKQR |
| 840.4362 | 840.4077 | −.0285 | −34 | 125 | 130 | FYLQNR |
| 861.4981 | 861.4133 | −.0848 | −98 | 6 | 12 | ALHFVFK |
| 861.4981 | 861.4133 | −.0848 | −98 | 6 | 12 | ALHFVFK |
| 1030.6078 | 1030.5363 | −.0715 | −69 | 25 | 33 | DVLGMKVLR |
| 1030.6078 | 1030.5363 | −.0715 | −69 | 25 | 33 | DVLGMKVLR |
| 1053.5099 | 1053.5475 | .0376 | 36 | 163 | 170 | IYEKDEEK |
| 1514.713 | 1514.6606 | −.0524 | −35 | 151 | 162 | SLNYWCNLLGMK |
| 2068.0127 | 2067.8892 | −.1235 | −60 | 82 | 101 | LGNDFMGITLASS |
| | | | | | | QAVSN |
| | | | | | | AR |

| | |
|---|---|
| unnamed protein product [Homo sapiens] | gi\|13515362 |

[0512] Peptide Information

| | Obsrv. | | | Start | End | |
|---|---|---|---|---|---|---|
| Calc. Mass | Mass | ±da | ±ppm | Seq. | Seq. | Sequence |
| 808.4199 | 808.4188 | −.0011 | −1 | 674 | 679 | EQYLQK |
| 814.4094 | 814.4131 | .0037 | 5 | 338 | 343 | IYFDTR |
| 817.405 | 817.4197 | .0147 | 18 | 1537 | 1543 | DDEVAIR |
| 818.4267 | 818.4182 | −.0085 | −10 | 370 | 375 | WQNSKR |
| 820.344 | 820.3947 | .0507 | 62 | 1389 | 1394 | CQQPCK |
| 825.4287 | 825.44 | .0113 | 14 | 476 | 482 | YLLMGGR |
| 830.4267 | 830.414 | −.0127 | −15 | 997 | 1002 | LNYQHR |
| 844.504 | 844.4724 | −.0316 | −37 | 990 | 996 | VNIPFVR |
| 863.3424 | 863.4159 | .0735 | 85 | 35 | 41 | NGNQDCR |
| 864.4547 | 864.4229 | −.0318 | −37 | 4 | 10 | NPHQGRR |
| 870.4866 | 870.5379 | .0513 | 59 | 1396 | 1402 | LLICSHK |
| 986.5768 | 986.5456 | −.0312 | −32 | 1568 | 1575 | LEEIEIIK |
| 986.5768 | 986.5456 | −.0312 | −32 | 1568 | 1575 | LEEIEIIK |
| 1251.5419 | 1251.595 | .0531 | 42 | 642 | 651 | AYMSIMTQMK |
| 1858.0123 | 1857.8317 | −.1806 | −97 | 1761 | 1776 | VQIVSAIGYPR |
| | | | | | | GHWFK |
| 2082.0059 | 2081.9111 | −.0948 | −46 | 1729 | 1745 | FTQEDEQLVQE |
| | | | | | | KMEALK |
| 2153.1292 | 2153.0808 | −.0484 | −22 | 859 | 874 | WQLYRLWLQL |
| | | | | | | YQADTR |
| 2441.1145 | 2441.0786 | −.0359 | −15 | 642 | 662 | AYMSIMTQMKE |
| | | | | | | SEQELH |
| | | | | | | EGAK |
| 2455.2861 | 2455.0752 | −.2109 | −86 | 896 | 918 | LQEDLHILKDA |
| | | | | | | QVVGMTT |
| | | | | | | TGAAK |
| 2473.1045 | 2473.0457 | −.0588 | −24 | 642 | 662 | AYMSIMTQMKE |
| | | | | | | SEQELH |
| | | | | | | EGAK |
| 2473.1045 | 2473.0457 | −.0588 | −24 | 642 | 662 | AYMSIMTQMKE |
| | | | | | | SEQELH |
| | | | | | | EGAK |

| | |
|---|---|
| MSTP102 [Homo sapiens] | gi\|33338010 |

[0513] Peptide Information

| | Obsrv. | | | Start | End | |
|---|---|---|---|---|---|---|
| Calc. Mass | Mass | ±da | ±ppm | Seq. | Seq. | Sequence |
| 860.4737 | 860.4324 | −.0413 | −48 | 8 | 14 | RQNAFPK |
| 1053.5583 | 1053.5475 | −.0108 | −10 | 1 | 8 | MPYLMVKR |
| 2455.2036 | 2455.0752 | −.1284 | −52 | 17 | 38 | MSVFTISVQHYAD |
| | | | | | | GSSQL |
| | | | | | | GQKR |
| 2512.25 | 2512.1931 | −.0569 | −23 | 15 | 37 | TKMSVFTISVQHY |
| | | | | | | ADGSS |
| | | | | | | QLGQK |
| 2512.25 | 2512.1931 | −.0569 | −23 | 15 | 37 | TKMSVFTISVQHY |
| | | | | | | ADGSS |
| | | | | | | QLGQK |

| | |
|---|---|
| immunoglobulin heavy chain variable region | gi\|66821381 |
| [Homo sapiens] | |

[0514] Peptide Information

| | | | | Start | End | |
|---|---|---|---|---|---|---|
| Calc. Mass | Obsrv. Mass | ±da | ±ppm | Seq. | Seq. | Sequence |
| 817.4566 | 817.4197 | −.0369 | −45 | 106 | 111 | WELLTR |
| 820.373 | 820.3947 | .0217 | 26 | 97 | 102 | ECARER |
| 830.4268 | 830.414 | −.0128 | −15 | 1 | 9 | GAAGGVWGR |
| 836.4737 | 836.3985 | −.0752 | −90 | 64 | 70 | GRFTISR |
| 986.5278 | 986.5456 | .0178 | 18 | 1 | 10 | GAAGGVWGRR |
| 986.5278 | 986.5456 | .0178 | 18 | 1 | 10 | GAAGGVWGRR |
| 2096.0271 | 2095.9111 | −.116 | −55 | 106 | 123 | WELLTRGAFDIWG |
| | | | | | | QGTMV |

| | |
|---|---|
| OSBPL8 protein [Homo sapiens] | gi\|51895890 |

[0515] Peptide Information

| | Obsrv. | | | Start | End | |
|---|---|---|---|---|---|---|
| Calc. Mass | Mass | ±da | ±ppm | Seq. | Seq. | Sequence |
| 820.441 | 820.3947 | −.0463 | −56 | 13 | 20 | TSLLGDSK |
| 822.3588 | 822.3813 | .0225 | 27 | 247 | 254 | ATSESDGR |
| 834.425 | 834.4084 | −.0166 | −20 | 43 | 49 | MSQRQGK |
| 850.4199 | 850.4161 | −.0038 | −4 | 43 | 49 | MSQRQGK |
| 863.4767 | 863.4159 | −.0608 | −70 | 266 | 272 | CSSLLKR |
| 1053.5422 | 1053.5475 | .0053 | 5 | 108 | 117 | DSSTSSKLTK |
| 1546.7708 | 1546.6415 | −.1293 | −84 | 693 | 706 | AINAKDQTEATQEK |
| 1546.7708 | 1546.6415 | −.1293 | −84 | 693 | 706 | AINAKDQTEATQEK |
| 1875.7297 | 1875.8496 | .1199 | 64 | 334 | 349 | ENDQEHDESDNE |
| | | | | | | VMGK |
| 1890.9232 | 1890.8475 | −.0757 | −40 | 649 | 664 | KTDNSEVFWNPTP |
| | | | | | | DIK |
| 2153.0002 | 2153.0808 | .0806 | 37 | 247 | 265 | ATSESDGRCWMD |
| | | | | | | ALELA |
| | | | | | | LK |
| 2487.2766 | 2487.0583 | −.2183 | −88 | 627 | 648 | LGKEVLATLEGHW |
| | | | | | | DSEV |
| | | | | | | FITDK |
| 2487.2766 | 2487.0583 | −.2183 | −88 | 627 | 648 | LGKEVLATLEGHW |
| | | | | | | DSEV |
| | | | | | | FITDK |
| 2512.334 | 2512.1931 | −.1409 | −56 | 184 | 205 | NGQWVGTVLLNA |
| | | | | | | CEIIER |
| | | | | | | PSKK |
| 2512.334 | 2512.1931 | −.1409 | −56 | 184 | 205 | NGQWVGTVLLNACEIIER |
| | | | | | | PSKK |

| | |
|---|---|
| unnamed protein product [Homo sapiens] | gi\|11191031 |

[0516] Peptide Information

| | Obsrv. | | | Start | End | |
|---|---|---|---|---|---|---|
| Calc. Mass | Mass | ±da | ±ppm | Seq. | Seq. | Sequence |
| 823.4607 | 823.4086 | −.0521 | −63 | 2 | 8 | PLGHIMR |
| 857.4515 | 857.4417 | −.0098 | −11 | 112 | 117 | YYVKER |
| 865.3785 | 865.4606 | .0821 | 95 | 232 | 239 | TESALTED |
| 870.5083 | 870.5379 | .0296 | 34 | 109 | 115 | LGKYYVK |
| 986.491 | 986.5456 | .0546 | 55 | 1 | 8 | MPLGHIMR |
| 986.491 | 986.5456 | .0546 | 55 | 1 | 8 | MPLGHIMR |
| 2095.9429 | 2095.9111 | −.0318 | −15 | 206 | 222 | YAMTVWYFDAEE |
| | | | | | | RAEAK |
| 2473.2551 | 2473.0457 | −.2094 | −85 | 173 | 192 | SFIADVEPIFDRLL |
| | | | | | | FFWSDR |
| 2473.2551 | 2473.0457 | −.2094 | −85 | 173 | 192 | SFIADVEPIFDRLL |
| | | | | | | FFWSDR |

| | |
|---|---|
| unnamed protein product [Homo sapiens] | gi\|10439719 |

[0517] Peptide Information

| | Obsrv. | | | Start | End | |
|---|---|---|---|---|---|---|
| Calc. Mass | Mass | ±da | ±ppm | Seq. | Seq. | Sequence |
| 806.444 | 806.3729 | −.0711 | −88 | 160 | 166 | QSMVTLK |
| 818.473 | 818.4182 | −.0548 | −67 | 421 | 427 | ETSVVRK |
| 822.439 | 822.3813 | −.0577 | −70 | 160 | 166 | QSMVTLK |
| | 822.3813 | | | | | |
| 844.5251 | 844.4724 | −.0527 | −62 | 380 | 388 | LGSGGVVKK |
| 850.3975 | 850.4161 | .0186 | 22 | 79 | 85 | EELNMSK |
| 860.4836 | 860.4324 | −.0512 | −60 | 119 | 126 | TVSPSTIR |
| 1874.9753 | 1874.8535 | −.1218 | −65 | 89 | 104 | TIQQNITEQASVM |
| | | | | | | QKR |
| 1874.9753 | 1874.8535 | −.1218 | −65 | 89 | 104 | TIQQNITEQASVM |
| | | | | | | QKR |
| 1890.9702 | 1890.8475 | −.1227 | −65 | 89 | 104 | TIQQNITEQASVM |
| | | | | | | QKR |
| 2068.0508 | 2067.8892 | −.1616 | −78 | 287 | 304 | GLPHMFQQGGVF |
| | | | | | | YSIMKK |
| 2455.304 | 2455.0752 | −.2288 | −93 | 50 | 72 | VGDVQGQESESQ |
| | | | | | | LPTKII |
| | | | | | | LTGQK |
| 2512.1445 | 2512.1931 | .0486 | 19 | 266 | 286 | EMYSLCLLATLMG |
| | | | | | | EDVW |
| | | | | | | SYAK |
| 2512.1445 | 2512.1931 | .0486 | 19 | 266 | 286 | EMYSLCLLATLMG |
| | | | | | | EDVW |
| | | | | | | SYAK |

| | |
|---|---|
| egl nine homolog 3 [Homo sapiens] | gi\|11545787 |

[0518] Protein Group

| | |
|---|---|
| EGLN3 protein [Homo sapiens] | gi\|130267189 |
| EGLN3 protein [Homo sapiens] | gi\|14547150 |
| Egl nine homolog 3 (C. elegans) [Homo sapiens] | gi\|127798639 |
| Egl nine homolog 3 (C. elegans) [Homo sapiens] | gi\|127796436 |
| Egl nine homolog 3 (C. elegans) [Homo sapiens] | |
| Egl nine homolog 3 (C. elegans) [Homo sapiens] | gi\|77748083 |
| RecName: Full = Egl nine homolog 3; AltName: | gi\|32129515 |
| Full = HPH-1; AltName: | |
| Full = Hypoxia-inducible factor prolyl | |
| hydroxylase 3; Short = HIF-PH3; | |
| Short = HIF- | |
| prolyl | |
| hydroxylase 3; Short = HPH-3; AltName: Full = Prolyl | |
| hydroxylase domain- | |
| containing protein 3; | |
| Short = PHD3 | |
| egl nine homolog 3 (C. elegans) [Homo sapiens] | gi\|119586333 |
| unnamed protein product [Homo sapiens] | gi\|10437756 |
| unnamed protein product [Homo sapiens] | gi\|40216521 |
| unnamed protein product [Homo sapiens] | gi\|25897867 |

[0519] Peptide Information

| | | | | Start | End | |
|---|---|---|---|---|---|---|
| Calc. Mass | Obsrv. Mass | ±da | ±ppm | Seq. | Seq. | Sequence |
| 823.4607 | 823.4086 | −.0521 | −63 | 2 | 8 | PLGHIMR |
| 857.4515 | 857.4417 | −.0098 | −11 | 112 | 117 | YYVKER |
| 865.3785 | 865.4606 | .0821 | 95 | 232 | 239 | TESALTED |
| 870.5083 | 870.5379 | .0296 | 34 | 109 | 115 | LGKYYVK |
| 986.491 | 986.5456 | .0546 | 55 | 1 | 8 | MPLGHIMR |
| 986.491 | 986.5456 | .0546 | 55 | 1 | 8 | MPLGHIMR |
| 2095.9429 | 2095.9111 | −.0318 | −15 | 206 | 222 | YAMTVWYFDA |
| | | | | | | EERAEAK |
| 2473.2551 | 2473.0457 | −.2094 | −85 | 173 | 192 | SFIADVEPIFDR |
| | | | | | | LLFFWSDR |
| 2473.2551 | 2473.0457 | −.2094 | −85 | 173 | 192 | SFIADVEPIFDR |
| | | | | | | LLFFWSDR |

| | |
|---|---|
| unnamed protein product [Homo sapiens] | gi\|21439430 |

[0520] Peptide Information

| | Obsrv. | | | Start | End | |
|---|---|---|---|---|---|---|
| Calc. Mass | Mass | ±da | ±ppm | Seq. | Seq. | Sequence |
| 800.4413 | 800.4009 | −.0404 | −50 | 17 | 23 | LSPWAAR |
| 806.4003 | 806.3729 | −.0274 | −34 | 192 | 198 | SDAETKR |
| 814.4278 | 814.4131 | −.0147 | −18 | 24 | 30 | STHRGTR |
| 836.3897 | 836.3985 | .0088 | 11 | 178 | 184 | LGDDFNR |
| 848.4876 | 848.4392 | −.0484 | −57 | 213 | 219 | QEWFVK |
| 872.506 | 872.4337 | −.0723 | −83 | 95 | 102 | LLRNSGGR |
| 1251.5237 | 1251.595 | .0713 | 57 | 2 | 12 | AESSSESDHFR |
| 1321.6495 | 1321.647 | −.0025 | −2 | 178 | 188 | LGDDFNRELSR |

| | |
|---|---|
| hypothetical protein [Homo sapiens] | gi\|51476912 |

[0521] Peptide Information

| | Obsrv. | | | Start | End | |
|---|---|---|---|---|---|---|
| Calc. Mass | Mass | ±da | ±ppm | Seq. | Seq. | Sequence |
| 817.4964 | 817.4197 | −.0767 | −94 | 283 | 289 | GCIKVLK |
| | 817.4197 | | | | | |
| 822.4389 | 822.3813 | −.0576 | −70 | 276 | 282 | TSKIDMK |
| 836.436 | 836.3985 | −.0375 | −45 | 200 | 207 | TLSDATTK |
| 863.4655 | 863.4159 | −.0496 | −57 | 318 | 324 | QIKSMLQ |
| 1857.9202 | 1857.8317 | −.0885 | −48 | 58 | 74 | GAGHEIREAIQ |
| | | | | | | HPADEK |
| 1875.8806 | 1875.8496 | −.031 | −17 | 147 | 161 | MTNPAIQNDFS |
| | | | | | | YYRR |
| 2096.0002 | 2095.9111 | −.0891 | −43 | 168 | 186 | INNVPAEGENE |
| | | | | | | VNNELANR |
| 2153.1577 | 2153.0808 | −.0769 | −36 | 256 | 275 | VMVGVIILYDHV |
| | | | | | | HPAGAF |
| | | | | | | AK |

| | |
|---|---|
| tripartite motif-containing 14, isoform CRA_b | gi\|119579275 |
| [Homo sapiens] | |

[0522] Peptide Information

| | | | | Start | End | |
|---|---|---|---|---|---|---|
| Calc. Mass | Obsrv. Mass | ±da | ±ppm | Seq. | Seq. | Sequence |
| 830.4301 | 830.414 | −.0161 | −19 | 1 | 7 | MPPRSSR |
| 834.3951 | 834.4084 | .0133 | 16 | 8 | 15 | QANAESSK |
| 850.4781 | 850.4161 | −.062 | −73 | 20 | 26 | GKFTELR |
| 1211.6855 | 1211.7461 | .0606 | 50 | 150 | 160 | VSSPRLVSNRP |
| 1890.0219 | 1889.8499 | −.172 | −91 | 22 | 37 | FTELRLLLDEEEAL |
| | | | | | | AK |
| 2082.0034 | 2081.9111 | −.0923 | −44 | 43 | 59 | NTQLTLQVYREQA |
| | | | | | | DSCR |

| | |
|---|---|
| unnamed protein product | gi\|40035634 |
| [Homo sapiens] | |

[0523] Protein Group

| | |
|---|---|
| unnamed protein product [Homo sapiens] | gi\|10435893 |

[0524] Peptide Information

| | | | | Start | End | |
|---|---|---|---|---|---|---|
| Calc. Mass | Obsrv. Mass | ±da | ±ppm | Seq. | Seq. | Sequence |
| 808.4199 | 808.4188 | −.0011 | −1 | 38 | 43 | EQYLQK |
| 817.405 | 817.4197 | .0147 | 18 | 901 | 907 | DDEVAIR |
| 818.4553 | 818.4182 | −.0371 | −45 | 509 | 515 | ICVALSR |
| 820.344 | 820.3947 | .0507 | 62 | 753 | 758 | CQQPCK |
| 830.4267 | 830.414 | −.0127 | −15 | 361 | 366 | LNYQHR |
| 844.504 | 844.4724 | −.0316 | −37 | 354 | 360 | VNIPFVR |
| 870.4866 | 870.5379 | .0513 | 59 | 760 | 766 | LLICSHK |
| 986.5768 | 986.5456 | −.0312 | −32 | 932 | 939 | LEEIEIIK |
| 986.5768 | 986.5456 | −.0312 | −32 | 932 | 939 | LEEIEIIK |
| 1251.5419 | 1251.595 | .0531 | 42 | 6 | 15 | AYMSIMTQMK |
| 2082.0059 | 2081.9111 | −.0948 | −46 | 1093 | 1109 | FTQEDEQLVQE |
| | | | | | | KMEALK |
| 2153.1292 | 2153.0808 | −.0484 | −22 | 223 | 238 | WQLYRLWLQL |
| | | | | | | YQADTR |
| 2441.1145 | 2441.0786 | −.0359 | −15 | 6 | 26 | AYMSIMTQMKE |
| | | | | | | SEQELH |
| | | | | | | EGAK |
| 2455.2861 | 2455.0752 | −.2109 | −86 | 260 | 282 | LQEDLHILKDA |
| | | | | | | QVVGMTT |
| | | | | | | TGAAK |
| 2473.1045 | 2473.0457 | −.0588 | −24 | 6 | 26 | AYMSIMTQMKE |
| | | | | | | SEQELH |
| | | | | | | EGAK |
| 2473.1045 | 2473.0457 | −.0588 | −24 | 6 | 26 | AYMSIMTQMKE |
| | | | | | | SEQELH |
| | | | | | | EGAK |

| | |
|---|---|
| myosin IB, isoform CRA_b [Homo sapiens] | gi\|119631245 |

[0525] Peptide Information

| Calc. | Obsrv. | | | Start | End | |
|---|---|---|---|---|---|---|
| Mass | Mass | ±da | ±ppm | Seq. | Seq. | Sequence |
| 816.4362 | 816.4129 | −.0233 | −29 | 512 | 518 | IQHYAGK |
| 820.4597 | 820.3947 | −.065 | −79 | 576 | 583 | ASVATLMK |
| 836.4368 | 836.3985 | −.0383 | −46 | 1 | 7 | MAKMEVK |
| 844.4523 | 844.4724 | .0201 | 24 | 132 | 139 | GAEVNQVK |
| 861.4312 | 861.4133 | −.0179 | −21 | 292 | 299 | VNGLDESK |
| 861.4424 | 861.4133 | −.0291 | −34 | 94 | 100 | SLRDQDK |
| 1514.7614 | 1514.6606 | −.1008 | −67 | 595 | 605 | YFWHMKLSQFK |
| 1857.9706 | 1857.8317 | −.1389 | −75 | 140 | 156 | EQLLQSNPVLEAF |
| | | | | | | GNAK |
| 1890.0266 | 1889.8499 | −.1767 | −93 | 566 | 583 | RPPTAGSQFKASV |
| | | | | | | ATLMK |
| 2139.0938 | 2139.0833 | −.0105 | −5 | 120 | 139 | LVMSYVAAVCGK |
| | | | | | | GAEVN |
| | | | | | | QVK |

| | | | |
|---|---|---|---|
| | 75/C24 | | Instr./Gel |
| | | | Origin |
| | [1] Sample Project | | Instrument |
| | 20110503 | | Sample |
| | | | Name |
| Protein Name- | KH17 (SEQ ID NO. KH17) | Accession No. | |

| | |
|---|---|
| unnamed protein product [Homo sapiens] | gi\|194376310 |

[0526] Peptide Information

| | Obsrv. | | | Start | End | |
|---|---|---|---|---|---|---|
| Calc. Mass | Mass | ±da | ±ppm | Seq. | Seq. | Sequence |
| 923.5672 | 923.5624 | −.0048 | −5 | 301 | 308 | IIAPPERK |
| 976.4483 | 976.4526 | .0043 | 4 | 19 | 28 | AGFAGDDAPR |
| 976.4483 | 976.4526 | .0043 | 4 | 19 | 28 | AGFAGDDAPR |
| 1036.6514 | 1036.6522 | .0008 | 1 | 299 | 307 | IKIIAPPER |
| 1132.527 | 1132.53 | .003 | 3 | 169 | 178 | GYSFTTTAER |
| 1132.527 | 1132.53 | .003 | 3 | 169 | 178 | GYSFTTTAER |
| 1198.7056 | 1198.7052 | −.0004 | 0 | 29 | 39 | AVFPSIVGRPR |
| 1198.7056 | 1198.7052 | −.0004 | 0 | 29 | 39 | AVFPSIVGRPR |
| | 1198.7052 | | | | | |
| 1516.7028 | 1516.7002 | −.0026 | −2 | 332 | 344 | QEYDESGPSIVHR |
| 1516.7028 | 1516.7002 | −.0026 | −2 | 332 | 344 | QEYDESGPSIVHR |
| 1629.8231 | 1629.8131 | −.01 | −6 | 169 | 182 | GYSFTTTAEREIVR |
| 1639.8361 | 1639.8319 | −.0042 | −3 | 150 | 163 | LDLAGRDLTDYLMK |
| 1790.892 | 1790.8784 | −.0136 | −8 | 211 | 226 | SYELPDGQVITIGNER |
| 1790.892 | 1790.8784 | −.0136 | −8 | 211 | 226 | SYELPDGQVITIGNER |
| 1954.0645 | 1954.0728 | .0083 | 4 | 68 | 85 | VAPEEHPVLLTEAPLNPK |
| 2231.0649 | 2231.0669 | .002 | 1 | 264 | 284 | DLYANTVLSGGTTMYPGI |
| | | | | | | ADR |

| | |
|---|---|
| unnamed protein product [Homo sapiens] | gi\|194388064 |

[0527] Peptide Information

| | Obsrv. | | | Start | End | |
|---|---|---|---|---|---|---|
| Calc. Mass | Mass | ±da | ±ppm | Seq. | Seq. | Sequence |
| 923.5672 | 923.5624 | −.0048 | −5 | 310 | 317 | IIAPPERK |
| 976.4483 | 976.4526 | .0043 | 4 | 19 | 28 | AGFAGDDAPR |
| 976.4483 | 976.4526 | .0043 | 4 | 19 | 28 | AGFAGDDAPR |
| 1036.6514 | 1036.6522 | .0008 | 1 | 308 | 316 | IKIIAPPER |
| 1132.527 | 1132.53 | .003 | 3 | 178 | 187 | GYSFTTTAER |
| 1132.527 | 1132.53 | .003 | 3 | 178 | 187 | GYSFTTTAER |
| 1198.7056 | 1198.7052 | −.0004 | 0 | 29 | 39 | AVFPSIVGRPR |
| 1198.7056 | 1198.7052 | −.0004 | 0 | 29 | 39 | AVFPSIVGRPR |
| 1516.7028 | 1516.7002 | −.0026 | −2 | 341 | 353 | QEYDESGPSIVHR |
| 1516.7028 | 1516.7002 | −.0026 | −2 | 341 | 353 | QEYDESGPSIVHR |
| 1629.8231 | 1629.8131 | −.01 | −6 | 178 | 191 | GYSFTTTAEREIVR |
| 1639.8361 | 1639.8319 | −.0042 | −3 | 159 | 172 | LDLAGRDLTDYLMK |
| 1790.892 | 1790.8784 | −.0136 | −8 | 220 | 235 | SYELPDGQVITIGN |
| | | | | | | ER |
| 1790.892 | 1790.8784 | −.0136 | −8 | 220 | 235 | SYELPDGQVITI |
| | | | | | | GNER |
| 1954.0645 | 1954.0728 | .0083 | 4 | 96 | 113 | VAPEEHPVLLT |
| | | | | | | EAPLNPK |
| 2231.0649 | 2231.0669 | .002 | 1 | 273 | 293 | DLYANTVLSGG |
| | | | | | | TTMYPGI ADR |

| | |
|---|---|
| ACTB protein [Homo sapiens] | gi\|15277503 |

[0528] Peptide Information

| | Obsrv. | | | Start | End | |
|---|---|---|---|---|---|---|
| Calc. Mass | Mass | ±da | ±ppm | Seq. | Seq. | Sequence |
| 923.5672 | 923.5624 | −.0048 | −5 | 314 | 321 | IIAPPERK |
| 976.4483 | 976.4526 | .0043 | 4 | 4 | 13 | AGFAGDDAPR |
| 976.4483 | 976.4526 | .0043 | 4 | 4 | 13 | AGFAGDDAPR |
| 1036.6514 | 1036.6522 | .0008 | 1 | 312 | 320 | IKIIAPPER |
| 1132.527 | 1132.53 | .003 | 3 | 182 | 191 | GYSFTTTAER |
| 1132.527 | 1132.53 | .003 | 3 | 182 | 191 | GYSFTTTAER |
| 1198.7056 | 1198.7052 | −.0004 | 0 | 14 | 24 | AVFPSIVGRPR |
| 1198.7056 | 1198.7052 | −.0004 | 0 | 14 | 24 | AVFPSIVGRPR |
| 1516.7028 | 1516.7002 | −.0026 | −2 | 345 | 357 | QEYDESGPSIV |
| | | | | | | HR |
| 1516.7028 | 1516.7002 | −.0026 | −2 | 345 | 357 | QEYDESGPSIV |
| | | | | | | HR |
| 1629.8231 | 1629.8131 | −.01 | −6 | 182 | 195 | GYSFTTTAERE |
| | | | | | | IVR |
| 1639.8361 | 1639.8319 | −.0042 | −3 | 163 | 176 | LDLAGRDLTDY |
| | | | | | | LMK |
| 1790.892 | 1790.8784 | −.0136 | −8 | 224 | 239 | SYELPDGQVITI |
| | | | | | | GNER |
| 1790.892 | 1790.8784 | −.0136 | −8 | 224 | 239 | SYELPDGQVITI |
| | | | | | | GNER |
| 1954.0645 | 1954.0728 | .0083 | 4 | 81 | 98 | VAPEEHPVLLT |
| | | | | | | EAPLNPK |
| 2231.0649 | 2231.0669 | .002 | 1 | 277 | 297 | DLYANTVLSGG |
| | | | | | | TTMYPGI |
| | | | | | | ADR |

| | |
|---|---|
| actin, beta [Homo sapiens] | gi\|14250401 |

[0529] Protein Group

| | |
|---|---|
| Chain A, Model Of Actin-Fimbrin Abd2 Complex | gi\|168177284 |
| Chain A, Model Of Alpha-Actinin Ch1 Bound To | gi\|295321909 |
| F-Actin | |
| Chain B, Model Of Alpha-Actinin Ch1 Bound To | gi\|295321910 |
| F-Actin | |
| Chain C, Model Of Alpha-Actinin Ch1 Bound To | gi\|295321911 |
| F-Actin | |
| Chain D, Model Of Alpha-Actinin Ch1 Bound To | gi\|295321912 |
| F-Actin | |
| Chain E, Model Of Alpha-Actinin Ch1 Bound To | gi\|295321913 |
| F-Actin | |
| Chain F, Model Of Alpha-Actinin Ch1 Bound To | gi\|295321914 |
| F-Actin | |
| Chain G, Model Of Alpha-Actinin Ch1 Bound To | gi\|295321915 |
| F-Actin | |
| Chain H, Model Of Alpha-Actinin Ch1 Bound To | gi\|295321916 |
| F-Actin | |
| Chain I, Model Of Alpha-Actinin Ch1 Bound To | gi\|295321917 |
| F-Actin | |
| Chain J, Model Of Alpha-Actinin Ch1 Bound To | gi\|295321918 |
| F-Actin | |
| Unknown (protein for IMAGE: 3538275) | gi\|16924319 |
| [Homo sapiens] | |
| unnamed protein product [Homo sapiens] | gi\|194385944 |

[0530] Peptide Information

| | | | | Start | End | |
|---|---|---|---|---|---|---|
| Calc. Mass | Obsrv. Mass | ±da | ±ppm | Seq. | Seq. | Sequence |
| 923.5672 | 923.5624 | −.0048 | −5 | 322 | 329 | IIAPPERK |
| 976.4483 | 976.4526 | .0043 | 4 | 12 | 21 | AGFAGDDAPR |
| 976.4483 | 976.4526 | .0043 | 4 | 12 | 21 | AGFAGDDAPR |
| 1036.6514 | 1036.6522 | .0008 | 1 | 320 | 328 | IKIIAPPER |
| 1132.527 | 1132.53 | .003 | 3 | 190 | 199 | GYSFTTTAER |
| 1132.527 | 1132.53 | .003 | 3 | 190 | 199 | GYSFTTTAER |
| 1198.7056 | 1198.7052 | −.0004 | 0 | 22 | 32 | AVFPSIVG |
| | | | | | | RPR |
| 1198.7056 | 1198.7052 | −.0004 | 0 | 22 | 32 | AVFPSIVG |
| | | | | | | RPR |
| 1516.7028 | 1516.7002 | −.0026 | −2 | 353 | 365 | QEYDESGP |
| | | | | | | SIVHR |
| 1516.7028 | 1516.7002 | −.0026 | −2 | 353 | 365 | QEYDESGP |
| | | | | | | SIVHR |
| 1629.8231 | 1629.8131 | −.01 | −6 | 190 | 203 | GYSFTTTAERE |
| | | | | | | IVR |
| 1639.8361 | 1639.8319 | −.0042 | −3 | 171 | 184 | LDLAGRDLTDY |
| | | | | | | LMK |
| 1790.892 | 1790.8784 | −.0136 | −8 | 232 | 247 | SYELPDGQVITI |
| | | | | | | GNER |
| 1790.892 | 1790.8784 | −.0136 | −8 | 232 | 247 | SYELPDGQVITI |
| | | | | | | GNER |
| 1954.0645 | 1954.0728 | .0083 | 4 | 89 | 106 | VAPEEHPVLLT |
| | | | | | | EAPLNPK |
| 2231.0649 | 2231.0669 | .002 | 1 | 285 | 305 | DLYANTVLSGG |
| | | | | | | TTMYPGI |
| | | | | | | ADR |

[0531] Protein Group

| | |
|---|---|
| RecName: Full = Actin, cytoplasmic 2; AltName: | gi\|54036678 |
| Full = Gamma-actin; Contains: | |
| RecName: Full = Actin, cytoplasmic 2, | |
| N-terminally processed | |
| ACTG1 protein [Homo sapiens] | gi\|16041790 |
| ACTG1 protein [Homo sapiens] | gi\|15929094 |
| ACTG1 protein [Homo sapiens] | gi\|12804935 |
| ACTG1 protein [Homo sapiens] | gi\|17511847 |
| ACTG1 protein [Homo sapiens] | |
| Actin, beta [Homo sapiens] | gi\|15426536 |
| Actin, beta [Homo sapiens] | gi\|12654911 |
| Actin, beta [Homo sapiens] | gi\|12803203 |
| Actin, beta [Homo sapiens] | gi\|13279023 |
| Actin, beta [Homo sapiens] | gi\|15928803 |
| Actin, gamma 1 [Homo sapiens] | gi\|31565757 |
| Actin, gamma 1 [Homo sapiens] | gi\|15082291 |
| Actin, gamma 1 [Homo sapiens] | gi\|12653055 |
| Actin, gamma 1 [Homo sapiens] | gi\|13938581 |
| Actin, gamma 1 [Homo sapiens] | gi\|15990564 |
| Actin, gamma 1 [Homo sapiens] | gi\|15012187 |
| Actin, gamma 1 [Homo sapiens] | gi\|14602652 |
| RecName: Full = Actin, cytoplasmic 1; AltName: | gi\|46397333 |
| Full = Beta-actin; Contains: RecName: | |
| Full = Actin, cytoplasmic 1, N-terminally | |
| processed | |
| actin, beta [Homo sapiens] | gi\|45934426 |
| actin, cytoplasmic 1 [Homo sapiens] | gi\|4501885 |
| actin, cytoplasmic 2 [Homo sapiens] | gi\|316659409 |
| actin, cytoplasmic 2 [Homo sapiens] | gi\|4501887 |
| actin, cytoplasmic 2 [Homo sapiens] | |
| actin, gamma 1 [Homo sapiens] | gi\|54696574 |
| cytoplasmic beta actin [Homo sapiens] | gi\|177968 |
| gamma-actin [Homo sapiens] | gi\|178043 |
| hCG15971, isoform CRA_a [Homo sapiens] | gi\|119607749 |
| hCG15971, isoform CRA_a [Homo sapiens] | gi\|119607747 |
| unknown [Homo sapiens] | gi\|30172702 |
| unnamed protein product [Homo sapiens] | gi\|284806909 |
| unnamed protein product [Homo sapiens] | gi\|283915537 |
| unnamed protein product [Homo sapiens] | gi\|229610526 |
| unnamed protein product [Homo sapiens] | gi\|213500113 |
| unnamed protein product [Homo sapiens] | gi\|210029289 |
| unnamed protein | |
| product [Homo | |
| sapiens] | |

[0532] Peptide Information

| | | | | Start | End | |
|---|---|---|---|---|---|---|
| Calc. Mass | Obsrv. Mass | ±da | ±ppm | Seq. | Seq. | Sequence |
| 923.5672 | 923.5624 | −.0048 | −5 | 329 | 336 | IIAPPERK |
| 976.4483 | 976.4526 | .0043 | 4 | 19 | 28 | AGFAGDDAPR |
| 976.4483 | 976.4526 | .0043 | 4 | 19 | 28 | AGFAGDDAPR |
| 1036.6514 | 1036.6522 | .0008 | 1 | 327 | 335 | IKIIAPPER |
| 1132.527 | 1132.53 | .003 | 3 | 197 | 206 | GYSFTTTAER |
| 1132.527 | 1132.53 | .003 | 3 | 197 | 206 | GYSFTTTAER |
| 1198.7056 | 1198.7052 | −.0004 | 0 | 29 | 39 | AVFPSIVGRPR |
| 1198.7056 | 1198.7052 | −.0004 | 0 | 29 | 39 | AVFPSIVGRPR |
| 1516.7028 | 1516.7002 | −.0026 | −2 | 360 | 372 | QEYDESGPSIV |
| | | | | | | HR |
| 1516.7028 | 1516.7002 | −.0026 | −2 | 360 | 372 | QEYDESGPSIV |
| | | | | | | HR |
| 1629.8231 | 1629.8131 | −.01 | −6 | 197 | 210 | GYSFTTTAERE |
| | | | | | | IVR |
| 1639.8361 | 1639.8319 | −.0042 | −3 | 178 | 191 | LDLAGRDLTDY |
| | | | | | | LMK |
| 1790.892 | 1790.8784 | −.0136 | −8 | 239 | 254 | SYELPDGQVITI |
| | | | | | | GNER |
| 1790.892 | 1790.8784 | −.0136 | −8 | 239 | 254 | SYELPDGQVITI |
| | | | | | | GNER |
| 1954.0645 | 1954.0728 | .0083 | 4 | 96 | 113 | VAPEEHPVLLT |
| | | | | | | EAPLNPK |
| 2231.0649 | 2231.0669 | .002 | 1 | 292 | 312 | DLYANTVLSGG |
| | | | | | | TTMYPGI |
| | | | | | | ADR |

| | |
|---|---|
| POTE ankyrin domain family member E | gi\|134133226 |
| [Homo sapiens] | |

[0533] Protein Group

| | |
|---|---|
| Actin, beta [Homo sapiens] | gi\|134133226 |
| | gi\|16359158 |
| POTE ankyrin domain family member F [Homo sapiens] | gi\|153791352 |
| POTE-2 alpha-actin [Homo sapiens] | gi\|145309046 |
| PS1TP5-binding protein 1 [Homo sapiens] | gi\|93211215 |
| RecName: Full = POTE ankyrin domain family member | gi\|166898073 |
| E; AltName: Full = ANKRD26-like family | |
| C member 1A; AltName: Full = Prostate, | |
| ovary, testis-expressed | |
| protein | |
| on chromosome 2; Short = POTE-2 | |
| RecName: Full = POTE ankyrin domain family member | gi\|215273934 |
| F; AltName: Full = ANKRD26-like family | |
| C member 1B; AltName: Full = Chimeric | |
| POTE-actin | |
| protein | |
| beta actin variant [Homo sapiens] | gi\|62897671 |
| beta actin variant [Homo sapiens] | gi\|62897409 |
| beta actin variant [Homo sapiens] | |
| beta actin variant [Homo sapiens] | gi\|62897625 |
| gamma-actin [Homo sapiens] | gi\|28339 |
| mutant beta-actin (beta′-actin) [Homo sapiens] | gi\|28336 |
| unnamed protein product [Homo sapiens] | gi\|194375299 |
| unnamed protein product [Homo sapiens] | gi\|158257306 |
| unnamed protein product [Homo sapiens] | gi\|66348792 |
| unnamed protein product [Homo sapiens] | gi\|28252 |

[0534] Peptide Information

| | | | | Start | End | |
|---|---|---|---|---|---|---|
| Calc. Mass | Obsrv. Mass | ±da | ±ppm | Seq. | Seq. | Sequence |
| 976.4483 | 976.4526 | .0043 | 4 | 719 | 728 | AGFAGDDAPR |
| 1198.7056 | 1198.7052 | −.0004 | 0 | 729 | 739 | AVFPSIVGRPR |
| 1516.7028 | 1516.7002 | −.0026 | −2 | 1060 | 1072 | QEYDESGPSIVHR |
| 1790.892 | 1790.8784 | −.0136 | −8 | 939 | 954 | SYELPDGQVITIGN |
| | | | | | | ER |

| | |
|---|---|
| Chain C, The Structure Of The Human Rnase H2 | gi\|312208155 |
| Complex Defines Key Interaction Interfaces | |
| Relevant To Enzyme Function And Human | |
| Disease | |

[0535] Protein Group

| | |
|---|---|
| AYP1 [Homo sapiens] | gi\|28628365 |
| AYP1 [Homo sapiens] | gi\|28628363 |
| AYP1 protein, isoform CRA_a [Homo sapiens] | gi\|119594839 |
| AYP1 protein, isoform CRA_b [Homo sapiens] | gi\|119594841 |
| AYP1 protein, isoform CRA_b [Homo sapiens] | gi\|119594840 |
| Chain F, The Structure Of The Human Rnase H2 | gi\|312208158 |
| Complex Defines Key Interaction Interfaces Relevant | |
| To Enzyme Function And Human | |
| Disease | |
| RNase H1 small subunit [Homo sapiens] | gi\|19421812 |
| RecName: Full = Ribonuclease H2 subunit C; | gi\|74730607 |
| Short = RNase H2 subunit C; AltName: | |
| Full = Aicardi-Goutieres syndrome 3 protein; | |
| Short = AGS3; AltName: Full = RNase H1 | |
| small subunit; | |
| AltName: Full = Ribonuclease HI subunit C | |
| Ribonuclease H2, subunit C [Homo sapiens] | gi\|23270834 |
| ribonuclease H2 subunit C [Homo sapiens] | gi\|38176285 |
| unnamed protein product [Homo sapiens] | gi\|194387324 |
| unnamed protein product [Homo sapiens] | gi\|10436946 |

[0536] Peptide Information

| Calc. | Obsrv. | | | Start | End | |
|---|---|---|---|---|---|---|
| Mass | Mass | ±da | ±ppm | Seq. | Seq. | Sequence |
| 1516.6809 | 1516.7002 | .0193 | 13 | 1 | 13 | MESGDEA |
| | | | | | | AIERHR |

| | |
|---|---|
| baculoviral IAP repeat-containing | gi\|119595708 |
| 7 (livin), isoform | |
| CRA_a [Homo sapiens] | gi\|15680241 |

[0537] Protein Group

| | |
|---|---|
| Baculoviral IAP repeat-containing 7 [Homo sapiens] | |
| LIVIN [Homo sapiens] | gi\|37182790 |
| LIVIN [Homo sapiens] | gi\|37182788 |
| RecName: Full = Baculoviral IAP repeat-containing | gi\|21759008 |
| protein 7; AltName: Full = Kidney inhibitor of apoptosis | |
| protein; Short = KIAP; AltName: Full = Livin; | |
| AltName: Full = Melanoma inhibitor of | |
| apoptosis protein; Short = ML-IAP; AltName: | |
| Full = RING finger protein 50 | |
| baculoviral IAP repeat-containing 7 (livin) [Homo | gi\|13560105 |
| sapiens] | |
| baculoviral IAP repeat-containing 7 (livin) [Homo | gi\|13560104 |
| sapiens] | |
| baculoviral IAP repeat-containing 7 (livin), isoform | gi\|119595709 |
| CRA_b [Homo sapiens] | |
| baculoviral IAP repeat-containing 7 [Homo sapiens] | gi\|41387695 |
| baculoviral IAP repeat-containing protein 7 isoform | gi\|21536421 |
| alpha [Homo sapiens] | |
| baculoviral IAP repeat-containing protein 7 isoform beta | gi\|11545910 |
| [Homo sapiens] | |
| inhibitor of apoptosis [Homo sapiens] | gi\|13785205 |
| inhibitor of apoptosis [Homo sapiens] | gi\|13785204 |
| inhibitor of apoptosis [Homo sapiens] | |
| inhibitor of apoptosis protein KIAP [Homo sapiens] | gi\|11545503 |
| livin inhibitor-of-apotosis [Homo sapiens] | gi\|11245453 |

[0538] Peptide Information

| Calc. | Obsrv. | | | Start | End | |
|---|---|---|---|---|---|---|
| Mass | Mass | ±da | ±ppm | Seq. | Seq. | Sequence |
| 1790.8206 | 1790.8784 | .0578 | 32 | 13 | 29 | GPQPSHWA |
| | | | | | | AGDGPTQ |
| | | | | | | ER |

| | |
|---|---|
| hsp90 co-chaperone Cdc37-like | gi\|66773038 |
| 1 [Homo sapiens] | |

[0539] Protein Group

| | |
|---|---|
| CDC37 cell division cycle 37 homolog | gi\|119579186 |
| (S. cerevisiae)-like 1 [Homo sapiens] | |
| Cell division cycle 37 homolog (S. cerevisiae)-like 1 | gi\|15559546 |
| [Homo sapiens] | |
| RecName: Full = Hsp90 co-chaperone Cdc37-like 1; | gi\|182705252 |
| AltName: Full = Hsp90-associating relative of Cdc37 | |
| cell division cycle 37 homolog (S. cerevisiae)-like 1 | gi\|57208646 |
| [Homo sapiens] | |
| cell division cycle 37 homolog (S. cerevisiae)-like 1 | gi\|10696978 |
| [Homo sapiens] | |
| unnamed protein product [Homo sapiens] | gi\|7020874 |

| | | | |
|---|---|---|---|
| | 75/C25 | | Instr./Gel |
| | | | Origin |
| | [1] Sample Project | | Instrument |
| | 20110504 | | Sample |
| | | | Name |
| Protein Name- | KH18 (SEQ ID NO. KH18) | Accession No. | |

| | |
|---|---|
| unnamed protein product [Homo sapiens] | gi\|194376311 |

[0540] Peptide Information

| | | | | Start | End | |
|---|---|---|---|---|---|---|
| Calc. Mass | Obsrv. Mass | ±da | ±ppm | Seq. | Seq. | Sequence |
| 2066.6760 | 2057.6322 | −.0055 | −4 | 211 | 229 | IIAPPERK |
| 2135.2369 | 2126.3699 | −.0059 | −4 | 215 | 233 | AGFAGDDAPR |
| 2203.7978 | 2195.1077 | −.0063 | −4 | 219 | 238 | AGFAGDDAPR |
| 2272.3587 | 2263.8454 | −.0067 | −5 | 223 | 243 | IKIIAPPER |
| 2340.920 | 2332.58 | −.007 | −5 | 227 | 247 | GYSFTTTAER |
| 2409.480 | 2401.32 | −.007 | −5 | 231 | 252 | GYSFTTTAER |
| 2478.0414 | 2470.0585 | −.0079 | −5 | 235 | 256 | AVFPSIVGRPR |
| 2546.6023 | 2538.7963 | −.0083 | −6 | 239 | 261 | AVFPSIVGRPR |
| 2615.163 | | | | | | |
| 2607.5340 | | | | | | |
| −0.00869 | | | | | | |

−
−6.04545 243.4587 265.6219
−2683.724 2676.272
0.00909
6.34091 247.4742 270.2324

| | | | | | | |
|---|---|---|---|---|---|---|
| 2752.2850 | 2745.0094 | −.0095 | −7 | 251 | 275 | QEYDESGPSIVHR |
| 2820.8459 | 2813.7471 | −.0099 | −7 | 256 | 279 | QEYDESGPSIVHR |
| 2889.4068 | 2882.4848 | −.01 | −7 | 260 | 284 | GYSFTTTAEREIVR |
| 2957.9677 | 2951.2226 | −.0107 | −8 | 264 | 289 | LDLAGRDLTDYLMK |
| 3026.529 | 3019.9603 | −.0111 | −8 | 268 | 293 | SYELPDGQVITIGNER |
| 3095.089 | 3088.6980 | −.0115 | −8 | 272 | 298 | SYELPDGQVITIGNER |
| 3163.6504 | 3157.4357 | −.0119 | −8 | 276 | 303 | VAPEEHPVLLTEAPLNPK |
| 3232.2113 | 3226.1734 | −.012 | −9 | 280 | 307 | DLYANTVLSGGTTMYPGI |
| | | | | | | ADR |

| | |
|---|---|
| unnamed protein product [Homo sapiens] | gi\|194388065 |

[0541] Peptide Information

| | Obsrv. | | | Start | End | |
|---|---|---|---|---|---|---|
| Calc. Mass | Mass | ±da | ±ppm | Seq. | Seq. | Sequence |
| 2107.5744 | 2107.5690 | −.0054 | −4 | 218 | 236 | IIAPPERK |
| 2189.0128 | 2189.0070 | −.0058 | −4 | 223 | 241 | AGFAGDDAPR |
| 2270.4513 | 2270.4450 | −.0062 | −4 | 227 | 246 | AGFAGDDAPR |
| 2351.8897 | 2351.8831 | −.0067 | −5 | 232 | 251 | IKIIAPPER |
| 2433.328 | 2433.32 | −.007 | −5 | 236 | 257 | GYSFTTTAER |
| 2514.767 | 2514.76 | −.008 | −5 | 240 | 262 | GYSFTTTAER |
| 2596.2051 | 2596.1972 | −.0080 | −6 | 245 | 267 | AVFPSIVGRPR |
| 2677.6436 | 2677.6352 | −.0084 | −6 | 249 | 272 | AVFPSIVGRPR |
| 2759.0821 | 2759.0732 | −.0089 | −6 | 253 | 277 | QEYDESGPSIVHR |
| 2840.5205 | 2840.5112 | −.0093 | −6 | 258 | 282 | QEYDESGPSIVHR |
| 2921.9590 | 2921.9493 | −.01 | −7 | 262 | 287 | GYSFTTTAEREIVR |
| 3003.3975 | 3003.3873 | −.0102 | −7 | 267 | 292 | LDLAGRDLTDYLMK |
| 3084.836 | 3084.8253 | −.0106 | −7 | 271 | 297 | SYELPDGQVITIGN |
| | | | | | | ER |
| 3166.274 | 3166.2633 | −.0110 | −8 | 275 | 302 | SYELPDGQVITIGN |
| | | | | | | ER |
| 3247.7128 | 3247.7014 | −.0115 | −8 | 280 | 307 | VAPEEHPVLLTEA |
| | | | | | | PLNPK |
| 3329.1513 | 3329.1394 | −.012 | −8 | 284 | 313 | DLYANTVLSGGTT |
| | | | | | | MYPGI |
| | | | | | | ADR |

| | |
|---|---|
| ACTB protein [Homo sapiens] | gi\|15277504 |

[0542] Peptide Information

| | | | | Start | End | |
|---|---|---|---|---|---|---|
| Calc. Mass | Obsrv. Mass | ±da | ±ppm | Seq. | Seq. | Sequence |
| 2056.9512 | 2056.9462 | −.0050 | −3 | 216 | 234 | IIAPPERK |
| 2130.2773 | 2130.2719 | −.0054 | −4 | 221 | 239 | AGFAGDDAPR |
| 2203.603 | 2203.598 | −0.00576 | −3.82258 | 224.8883 | 243.4938 | |
| 2276.93 | 2276.923 | −0.00615 | −4.09677 | 229.1396 | 248.3828 | |
| 2350.2558 | 2350.2492 | −.0065 | −4 | 233 | 253 | AGFAGDDAPR |
| 2423.5819 | 2423.5750 | −.0069 | −5 | 238 | 258 | IKIIAPPER |
| 2496.908 | 2496.90 | −.007 | −5 | 242 | 263 | GYSFTTTAER |
| 2570.234 | 2570.23 | −.008 | −5 | 246 | 268 | GYSFTTTAER |
| 2643.5603 | 2643.5523 | −.0081 | −5 | 250 | 273 | AVFPSIVGRPR |
| 2716.8865 | 2716.8780 | −.0084 | −6 | 255 | 278 | AVFPSIVGRPR |
| 2790.2126 | 2790.2038 | −.0088 | −6 | 259 | 283 | QEYDESGPSIV |
| | | | | | | HR |
| 2863.5388 | 2863.5296 | −.0092 | −6 | 263 | 287 | QEYDESGPSIV |
| | | | | | | HR |
| 2936.8649 | 2936.8553 | −.01 | −7 | 267 | 292 | GYSFTTTAERE |
| | | | | | | IVR |
| 3010.1911 | 3010.1811 | −.0100 | −7 | 272 | 297 | LDLAGRDLTDY |
| | | | | | | LMK |
| 3083.517 | 3083.5069 | −.0103 | −7 | 276 | 302 | SYELPDGQVITI |
| | | | | | | GNER |
| 3156.843 | 3156.8326 | −.0107 | −7 | 280 | 307 | SYELPDGQVITI |
| | | | | | | GNER |
| 3230.1695 | 3230.1584 | −.0111 | −8 | 284 | 312 | VAPEEHPVLLT |
| | | | | | | EAPLNPK |
| 3303.4956 | 3303.4841 | −.011 | −8 | 289 | 317 | DLYANTVLSGG |
| | | | | | | TTMYPGI |
| | | | | | | ADR |

| | |
|---|---|
| actin, beta [Homo sapiens] | gi\|14250401 |

[0543] Protein Group

| | |
|---|---|
| Chain A, Model Of Actin-Fimbrin Abd3 Complex | gi\|168177284 |
| Chain A, Model Of Alpha-Actinin Ch2 Bound To | gi\|295321909 |
| F-Actin | |
| Chain B, Model Of Alpha-Actinin Ch2 Bound To | gi\|295321910 |
| F-Actin | |
| Chain C, Model Of Alpha-Actinin Ch2 Bound To | gi\|295321911 |
| F-Actin | |
| Chain D, Model Of Alpha-Actinin Ch2 Bound To | gi\|295321912 |
| F-Actin | |
| Chain E, Model Of Alpha-Actinin Ch2 Bound To | gi\|295321913 |
| F-Actin | |
| Chain F, Model Of Alpha-Actinin Ch2 Bound To | gi\|295321914 |
| F-Actin | |
| Chain G, Model Of Alpha-Actinin Ch2 Bound To | gi\|295321915 |
| F-Actin | |
| Chain H, Model Of Alpha-Actinin Ch2 Bound To F- | gi\|295321916 |
| Actin | |
| Chain I, Model Of Alpha-Actinin Ch2 Bound To F-Actin | gi\|295321917 |
| Chain J, Model Of Alpha-Actinin Ch2 Bound To F-Actin | gi\|295321918 |
| Unknown (protein for IMAGE: 3538276) | gi\|16924319 |
| [Homo sapiens] | |
| unnamed protein product [Homo sapiens] | gi\|194385944 |

[0544] Peptide Information

| | | | | Start | End | |
|---|---|---|---|---|---|---|
| Calc. Mass | Obsrv. Mass | ±da | ±ppm | Seq. | Seq. | Sequence |
| 2044.6767 | 2044.6713 | −.0053 | −4 | 222 | 239 | IIAPPERK |
| 2112.7123 | 2112.7065 | −.0057 | −4 | 226 | 244 | AGFAGDDAPR |
| 2180.7479 | 2180.7417 | −.0061 | −4 | 230 | 248 | AGFAGDDAPR |
| 2248.7835 | 2248.7769 | −.0065 | −4 | 233 | 252 | IKIIAPPER |
| 2316.819 | 2316.81 | −.007 | −5 | 237 | 257 | GYSFTTTAER |
| 2384.855 | 2384.85 | −.007 | −5 | 241 | 261 | GYSFTTTAER |
| 2452.89 | 2452.883 | −0.00774 | −5.35368 | 244.5516 | 265.3232 | |
| 2520.926 | 2520.918 | −0.00814 | −5.64737 | 248.3132 | 269.6763 | |
| 2588.9614 | 2588.9529 | −.0085 | −6 | 252 | 274 | AVFPSIVGRPR |
| 2656.9970 | 2656.9881 | −.0089 | −6 | 256 | 278 | AVFPSIVGRPR |
| 2725.0326 | 2725.0233 | −.0093 | −7 | 260 | 283 | QEYDESGPSIVHR |
| 2793.0682 | 2793.0585 | −.0097 | −7 | 263 | 287 | QEYDESGPSIVHR |
| 2861.1038 | 2861.0937 | −.01 | −7 | 267 | 291 | GYSFTTTAEREIVR |
| 2929.1394 | 2929.1289 | −.0105 | −7 | 271 | 296 | LDLAGRDLTDYLMK |
| 2997.175 | 2997.1641 | −.0109 | −8 | 275 | 300 | SYELPDGQVITIGN |
| | | | | | | ER |
| 3065.211 | 3065.1993 | −.0113 | −8 | 278 | 305 | SYELPDGQVITIGN |
| | | | | | | ER |
| 3133.2462 | 3133.2345 | −.0117 | −8 | 282 | 309 | VAPEEHPVLLTEA |
| | | | | | | PLNPK |
| 3201.2818 | 3201.2697 | −.012 | −9 | 286 | 313 | DLYANTVLSGGTT |
| | | | | | | MYPGI |
| | | | | | | ADR |

| | |
|---|---|
| RecName: Full = Actin, cytoplasmic 3; AltName: | gi\|54036678 |
| Full = Gamma-actin; Contains: | |
| RecName: Full = Actin, cytoplasmic | |
| 3, N-terminally processed | |

[0545] Protein Group

| | |
|---|---|
| ACTG1 protein [Homo sapiens] | gi\|16041790 |
| ACTG1 protein [Homo sapiens] | gi\|15929094 |
| ACTG1 protein [Homo sapiens] | gi\|12804935 |
| ACTG1 protein [Homo sapiens] | gi\|17511847 |
| ACTG1 protein [Homo sapiens] | |
| Actin, beta [Homo sapiens] | gi\|15426536 |
| Actin, beta [Homo sapiens] | gi\|12654911 |
| Actin, beta [Homo sapiens] | gi\|12803203 |
| Actin, beta [Homo sapiens] | gi\|13279023 |
| Actin, beta [Homo sapiens] | gi\|15928803 |
| Actin, gamma 1 [Homo sapiens] | gi\|31565757 |
| Actin, gamma 1 [Homo sapiens] | gi\|15082291 |
| Actin, gamma 1 [Homo sapiens] | gi\|12653055 |
| Actin, gamma 1 [Homo sapiens] | gi\|13938581 |
| Actin, gamma 1 [Homo sapiens] | gi\|15990564 |
| Actin, gamma 1 [Homo sapiens] | gi\|15012187 |
| Actin, gamma 1 [Homo sapiens] | gi\|14602652 |
| RecName: Full = Actin, cytoplasmic 2; AltName: | gi\|46397333 |
| Full = Beta-actin; Contains: RecName: | |
| Full = Actin, cytoplasmic 2, N-terminally | |
| processed | |
| actin, beta [Homo sapiens] | gi\|45934426 |
| actin, cytoplasmic 1 [Homo sapiens] | gi\|4501885 |
| actin, cytoplasmic 2 [Homo sapiens] | gi\|316659409 |
| actin, cytoplasmic 2 [Homo sapiens] | gi\|4501887 |
| actin, cytoplasmic 2 [Homo sapiens] | |
| actin, gamma 2 [Homo sapiens] | gi\|54696574 |
| cytoplasmic beta actin [Homo sapiens] | gi\|177968 |
| gamma-actin [Homo sapiens] | gi\|178043 |
| hCG15971, isoform CRA_a [Homo sapiens] | gi\|119607749 |
| hCG15971, isoform CRA_a [Homo sapiens] | gi\|119607747 |
| unknown [Homo sapiens] | gi\|30172702 |
| unnamed protein product [Homo sapiens] | gi\|284806909 |
| unnamed protein product [Homo sapiens] | gi\|283915537 |
| unnamed protein product [Homo sapiens] | gi\|229610526 |
| unnamed protein product [Homo sapiens] | gi\|213500113 |
| unnamed protein product [Homo sapiens] | gi\|210029289 |
| unnamed protein | |
| product [Homo sapiens] | |

[0546] Peptide Information

| | Obsrv. | | | Start | End | |
|---|---|---|---|---|---|---|
| Calc. Mass | Mass | ±da | ±ppm | Seq. | Seq. | Sequence |
| 2107.5744 | 2107.5690 | −.0054 | −4 | 235 | 253 | IIAPPERK |
| 2189.0128 | 2189.0070 | −.0058 | −4 | 240 | 258 | AGFAGDDAPR |
| 2270.4513 | 2270.4450 | −.0062 | −4 | 245 | 264 | AGFAGDDAPR |
| 2351.8897 | 2351.8831 | −.0067 | −5 | 249 | 269 | IKIIAPPER |
| 2433.328 | 2433.32 | −.007 | −5 | 254 | 275 | GYSFTTTAER |
| 2514.767 | 2514.76 | −.008 | −5 | 259 | 280 | GYSFTTTAER |
| 2596.2051 | 2596.1972 | −.0080 | −6 | 264 | 286 | AVFPSIVGRPR |
| 2677.6436 | 2677.6352 | −.0084 | −6 | 269 | 291 | AVFPSIVGRPR |
| 2759.0821 | 2759.0732 | −.0089 | −6 | 273 | 297 | QEYDESGPSIVHR |
| 2840.5205 | 2840.5112 | −.0093 | −6 | 278 | 302 | QEYDESGPSIVHR |
| 2921.9590 | 2921.9493 | −.01 | −7 | 283 | 308 | GYSFTTTAEREIVR |
| 3003.3975 | 3003.3873 | −.0102 | −7 | 288 | 313 | LDLAGRDLTDYLMK |
| 3084.836 | 3084.8253 | −.0106 | −7 | 293 | 319 | SYELPDGQVITIGN |
| | | | | | | ER |
| 3166.274 | 3166.2633 | −.0110 | −8 | 297 | 324 | SYELPDGQVITIGN |
| | | | | | | ER |
| 3247.7128 | 3247.7014 | −.0115 | −8 | 302 | 330 | VAPEEHPVLLTEA |
| | | | | | | PLNPK |
| 3329.1513 | 3329.1394 | −.012 | −8 | 307 | 335 | DLYANTVLSGGTT |
| | | | | | | MYPGI |
| | | | | | | ADR |

| | |
|---|---|
| POTE ankyrin domain family member E | gi\|134133226 |
| [Homo sapiens] | |

[0547] Protein Group

| | |
|---|---|
| Actin, beta [Homo sapiens] | gi\|16359158 |
| POTE ankyrin domain family member F [Homo sapiens] | gi\|153791352 |
| POTE-3 alpha-actin [Homo sapiens] | gi\|145309046 |
| PS1TP5-binding protein 2 [Homo sapiens] | gi\|93211215 |
| RecName: Full = POTE ankyrin domain family member | gi\|166898073 |
| E; AltName: Full = ANKRD26-like family C | |
| member 2A; AltName: Full = Prostate, ovary, | |
| testis-expressed | |
| protein | |
| on chromosome 2; | |
| Short = POTE-3 | |
| RecName: Full = POTE ankyrin domain family member | gi\|215273934 |
| F; AltName: Full = ANKRD26-like family C | |
| member 2B; AltName: Full = Chimeric POTE- | |
| actin | |
| protein | |
| beta actin variant [Homo sapiens] | gi\|62897671 |
| beta actin variant [Homo sapiens] | gi\|62897409 |
| beta actin variant [Homo sapiens] | |
| beta actin variant [Homo sapiens] | gi\|62897625 |
| gamma-actin [Homo sapiens] | gi\|28339 |
| mutant beta-actin (beta′-actin) [Homo sapiens] | gi\|28336 |
| unnamed protein product [Homo sapiens] | gi\|194375299 |
| unnamed protein product [Homo sapiens] | gi\|158257306 |
| unnamed protein product [Homo sapiens] | gi\|66348792 |
| unnamed protein product [Homo sapiens] | gi\|28252 |

[0548] Peptide Information

| Calc. | Obsrv. | | | Start | End | |
|---|---|---|---|---|---|---|
| Mass | Mass | ±da | ±ppm | Seq. | Seq. | Sequence |
| 2061.0193 | 2061.0022 | −.0171 | −11 | 1110 | 1126 | AGFAGD |
| | | | | | | DAPR |
| 2337.1521 | 2337.1294 | −.0226 | −15 | 1209 | 1227 | AVFPSI |
| | | | | | | VGRPR |
| 2613.2849 | 2613.2567 | −.0282 | −19 | 1308 | 1328 | QEYDESG |
| | | | | | | PSIVHR |

| | |
|---|---|
| 76/D1 | Instr./Gel Origin |
| [1] Sample Project | Instrument |
| 20110503 | Sample |
| | Name |

| | |
|---|---|
| Protein Name | Accession No. |
| unnamed protein product [Homo | gi\|194388064 |
| sapiens] | |

[0549] Peptide Information

| | | | | Start | End | |
|---|---|---|---|---|---|---|
| Calc. Mass | Obsrv. Mass | ±da | ±ppm | Seq. | Seq. | Sequence |
| 923.5672 | 923.5703 | .0031 | 3 | 310 | 317 | IIAPPERK |
| 976.4483 | 976.4528 | .0045 | 5 | 19 | 28 | AGFAGDDAPR |
| 976.4483 | 976.4528 | .0045 | 5 | 19 | 28 | AGFAGDDAPR |
| 1132.527 | 1132.526 | −.001 | −1 | 178 | 187 | GYSFTTTAER |
| 1132.527 | 1132.526 | −.001 | −1 | 178 | 187 | GYSFTTTAER |
| 1198.7056 | 1198.7018 | −.0038 | −3 | 29 | 39 | AVFPSIVGRPR |
| 1198.7056 | 1198.7018 | −.0038 | −3 | 29 | 39 | AVFPSIVGRPR |
| 1354.6234 | 1354.6217 | −.0017 | −1 | 51 | 62 | DSYVGDEAQSKR |
| 1516.7028 | 1516.6896 | −.0132 | −9 | 341 | 353 | QEYDESGPSIVHR |
| 1516.7028 | 1516.6896 | −.0132 | −9 | 341 | 353 | QEYDESGPSIVHR |
| 1629.8231 | 1629.8079 | −.0152 | −9 | 178 | 191 | GYSFTTTAEREIVR |
| 1639.8361 | 1639.8278 | −.0083 | −5 | 159 | 172 | LDLAGRDLTDYLMK |
| 1790.892 | 1790.8685 | −.0235 | −13 | 220 | 235 | SYELPDGQVITIGN |
| | | | | | | ER |
| 1790.892 | 1790.8685 | −.0235 | −13 | 220 | 235 | SYELPDGQVITIGN |
| | | | | | | ER |
| 1954.0645 | 1954.0369 | −.0276 | −14 | 96 | 113 | VAPEEHPVLLTEA |
| | | | | | | PLNPK |
| 2231.0649 | 2231.0745 | .0096 | 4 | 273 | 293 | DLYANTVLSGGTT |
| | | | | | | MYPGI |
| | | | | | | ADR |

| | |
|---|---|
| ACTB protein [Homo | gi\|15277503 |
| sapiens] | |

[0550] Peptide Information

| | Obsrv. | | | Start | | |
|---|---|---|---|---|---|---|
| Calc. Mass | Mass | ±da | ±ppm | Seq. | End Seq. | Sequence |
| 923.5672 | 923.5703 | .0031 | 3 | 314 | 321 | IIAPPERK |
| 976.4483 | 976.4528 | .0045 | 5 | 4 | 13 | AGFAGDDAPR |
| 976.4483 | 976.4528 | .0045 | 5 | 4 | 13 | AGFAGDDAPR |
| 1132.527 | 1132.526 | −.001 | −1 | 182 | 191 | GYSFTTTAER |
| 1132.527 | 1132.526 | −.001 | −1 | 182 | 191 | GYSFTTTAER |
| 1198.7056 | 1198.7018 | −.0038 | −3 | 14 | 24 | AVFPSIVGRPR |
| 1198.7056 | 1198.7018 | −.0038 | −3 | 14 | 24 | AVFPSIVGRPR |
| 1354.6234 | 1354.6217 | −.0017 | −1 | 36 | 47 | DSYVGDEAQS |
| | | | | | | KR |
| 1516.7028 | 1516.6896 | −.0132 | −9 | 345 | 357 | QEYDESGPSIV |
| | | | | | | HR |
| 1516.7028 | 1516.6896 | −.0132 | −9 | 345 | 357 | QEYDESGPSIV |
| | | | | | | HR |
| 1629.8231 | 1629.8079 | −.0152 | −9 | 182 | 195 | GYSFTTTAERE |
| | | | | | | IVR |
| 1639.8361 | 1639.8278 | −.0083 | −5 | 163 | 176 | LDLAGRDLTDY |
| | | | | | | LMK |
| 1790.892 | 1790.8685 | −.0235 | −13 | 224 | 239 | SYELPDGQVITI |
| | | | | | | GNER |
| 1790.892 | 1790.8685 | −.0235 | −13 | 224 | 239 | SYELPDGQVITI |
| | | | | | | GNER |
| 1954.0645 | 1954.0369 | −.0276 | −14 | 81 | 98 | VAPEEHPVLLT |
| | | | | | | EAPLNPK |
| 2231.0649 | 2231.0745 | .0096 | 4 | 277 | 297 | DLYANTVLSGG |
| | | | | | | TTMYPGI |
| | | | | | | ADR |

| | |
|---|---|
| unnamed protein product [Homo sapiens] | gi\|194385944 |

[0551] Peptide Information

| | | | | Start | End | |
|---|---|---|---|---|---|---|
| Calc. Mass | Obsrv. Mass | ±da | ±ppm | Seq. | Seq. | Sequence |
| 923.5672 | 923.5703 | .0031 | 3 | 305 | 312 | IIAPPERK |
| 976.4483 | 976.4528 | .0045 | 5 | 19 | 28 | AGFAGDDAPR |
| 976.4483 | 976.4528 | .0045 | 5 | 19 | 28 | AGFAGDDAPR |
| 1132.527 | 1132.526 | −.001 | −1 | 173 | 182 | GYSFTTTAER |
| 1132.527 | 1132.526 | −.001 | −1 | 173 | 182 | GYSFTTTAER |
| 1198.7056 | 1198.7018 | −.0038 | −3 | 29 | 39 | AVFPSIVGRPR |
| 1198.7056 | 1198.7018 | −.0038 | −3 | 29 | 39 | AVFPSIVGRPR |
| 1354.6234 | 1354.6217 | −.0017 | −1 | 51 | 62 | DSYVGDEAQSKR |
| 1516.7028 | 1516.6896 | −.0132 | −9 | 336 | 348 | QEYDESGPSIVHR |
| 1516.7028 | 1516.6896 | −.0132 | −9 | 336 | 348 | QEYDESGPSIVHR |
| 1629.8231 | 1629.8079 | −.0152 | −9 | 173 | 186 | GYSFTTTAEREIVR |
| 1639.8361 | 1639.8278 | −.0083 | −5 | 154 | 167 | LDLAGRDLTDYLMK |
| 1790.892 | 1790.8685 | −.0235 | −13 | 215 | 230 | SYELPDGQVITIGN |
| | | | | | | ER |
| 1790.892 | 1790.8685 | −.0235 | −13 | 215 | 230 | SYELPDGQVITIGN |
| | | | | | | ER |
| 1954.0645 | 1954.0369 | −.0276 | −14 | 96 | 113 | VAPEEHPVLLTEA |
| | | | | | | PLNPK |
| 2231.0649 | 2231.0745 | .0096 | 4 | 268 | 288 | DLYANTVLSGGTT |
| | | | | | | MYPGI |
| | | | | | | ADR |

| | |
|---|---|
| Chain J, Model Of Alpha-Actinin Ch1 Bound | gi\|295321918 |
| To F-Actin | |

[0552] Protein Group

| | |
|---|---|
| Chain A, Model Of Actin-Fimbrin Abd2 Complex | gi\|168177284 |
| Chain A, Model Of Actin-Fimbrin Abd2 Complex | |
| Chain A, Model Of Alpha-Actinin Ch1 Bound To F- | gi\|295321909 |
| Actin | |
| Chain B, Model Of Alpha-Actinin Ch1 Bound To F- | gi\|295321910 |
| Actin | |
| Chain C, Model Of Alpha-Actinin Ch1 Bound To F- | gi\|295321911 |
| Actin | |
| Chain D, Model Of Alpha-Actinin Ch1 Bound To F- | gi\|295321912 |
| Actin | |
| Chain E, Model Of Alpha-Actinin Ch1 Bound To F- | gi\|295321913 |
| Actin | |
| Chain F, Model Of Alpha-Actinin Ch1 Bound To F- | gi\|295321914 |
| Actin | |
| Chain G, Model Of Alpha-Actinin Ch1 Bound To F- | gi\|295321915 |
| Actin | |
| Chain H, Model Of Alpha-Actinin Ch1 Bound To F- | gi\|295321916 |
| Actin | |
| Chain I, Model Of Alpha-Actinin Ch1 Bound To F-Actin | gi\|295321917 |
| Unknown (protein for IMAGE: 3538275) [Homo | gi\|16924319 |
| sapiens] | |
| actin, beta [Homo sapiens] | gi\|14250401 |
| actin, beta [Homo sapiens] | |

[0553] Peptide Information

| | | | | Start | End | |
|---|---|---|---|---|---|---|
| Calc. Mass | Obsrv. Mass | ±da | ±ppm | Seq. | Seq. | Sequence |
| 923.5672 | 923.5703 | .0031 | 3 | 328 | 335 | IIAPPERK |
| 976.4483 | 976.4528 | .0045 | 5 | 18 | 27 | AGFAGDDAPR |
| 976.4483 | 976.4528 | .0045 | 5 | 18 | 27 | AGFAGDDAPR |
| 1132.527 | 1132.526 | −.001 | −1 | 196 | 205 | GYSFTTTAER |
| 1132.527 | 1132.526 | −.001 | −1 | 196 | 205 | GYSFTTTAER |
| 1198.7056 | 1198.7018 | −.0038 | −3 | 28 | 38 | AVFPSIVGRPR |
| 1198.7056 | 1198.7018 | −.0038 | −3 | 28 | 38 | AVFPSIVGRPR |
| 1354.6234 | 1354.6217 | −.0017 | −1 | 50 | 61 | DSYVGDEAQSKR |
| 1516.7028 | 1516.6896 | −.0132 | −9 | 359 | 371 | QEYDESGPSIVHR |
| 1516.7028 | 1516.6896 | −.0132 | −9 | 359 | 371 | QEYDESGPSIVHR |
| 1629.8231 | 1629.8079 | −.0152 | −9 | 196 | 209 | GYSFTTTAEREIVR |
| 1639.8361 | 1639.8278 | −.0083 | −5 | 177 | 190 | LDLAGRDLTDYLMK |
| 1790.892 | 1790.8685 | −.0235 | −13 | 238 | 253 | SYELPDGQVITIGN |
| | | | | | | ER |
| 1790.892 | 1790.8685 | −.0235 | −13 | 238 | 253 | SYELPDGQVITIGN |
| | | | | | | ER |
| 1954.0645 | 1954.0369 | −.0276 | −14 | 95 | 112 | VAPEEHPVLLTEA |
| | | | | | | PLNPK |
| 2231.0649 | 2231.0745 | .0096 | 4 | 291 | 311 | DLYANTVLSGGTT |
| | | | | | | MYPGI |
| | | | | | | ADR |

| | |
|---|---|
| RecName: Full = Actin, cytoplasmic 2; AltName: | gi\|54036678 |
| Full = Gamma-actin; Contains: | |
| RecName: Full = Actin, cytoplasmic | |
| 2, N-terminally processed | |

[0554] Protein Group

| | |
|---|---|
| ACTG1 protein [Homo sapiens] | gi\|16041790 |
| ACTG1 protein [Homo sapiens] | gi\|15929094 |
| ACTG1 protein [Homo sapiens] | gi\|12804935 |
| ACTG1 protein [Homo sapiens] | gi\|17511847 |
| Actin, beta [Homo sapiens] | gi\|15426536 |
| Actin, beta [Homo sapiens] | gi\|12654911 |
| Actin, beta [Homo sapiens] | gi\|12803203 |
| Actin, beta [Homo sapiens] | gi\|13279023 |
| Actin, beta [Homo sapiens] | |
| Actin, beta [Homo sapiens] | gi\|15928803 |
| Actin, gamma 1 [Homo sapiens] | gi\|31565757 |
| Actin, gamma 1 [Homo sapiens] | gi\|15082291 |
| Actin, gamma 1 [Homo sapiens] | gi\|12653055 |
| Actin, gamma 1 [Homo sapiens] | gi\|13938581 |
| Actin, gamma 1 [Homo sapiens] | gi\|15990564 |
| Actin, gamma 1 [Homo sapiens] | gi\|15012187 |
| Actin, gamma 1 [Homo sapiens] | gi\|14602652 |
| RecName: Full = Actin, cytoplasmic 1; AltName: | gi\|46397333 |
| Full = Beta-actin; Contains: RecName: | |
| Full = Actin, cytoplasmic 1, N-terminally | |
| processed | |
| actin, beta [Homo sapiens] | gi\|45934426 |
| actin, cytoplasmic 1 [Homo sapiens] | gi\|4501885 |
| actin, cytoplasmic 1 [Homo sapiens] | gi\|316659409 |
| actin, cytoplasmic 2 [Homo sapiens] | gi\|4501887 |
| actin, cytoplasmic 2 [Homo sapiens] | gi\|54696574 |
| actin, gamma 1 [Homo sapiens] | gi\|177968 |
| cytoplasmic beta actin [Homo sapiens] | gi\|178043 |
| gamma-actin [Homo sapiens] | gi\|28339 |
| gamma-actin [Homo sapiens] | |
| hCG15971, isoform CRA_a [Homo sapiens] | gi\|119607749 |
| hCG15971, isoform CRA_a [Homo sapiens] | gi\|119607747 |
| unknown [Homo sapiens] | gi\|30172702 |
| unnamed protein product [Homo sapiens] | gi\|284806909 |
| unnamed protein product [Homo sapiens] | gi\|283915537 |
| unnamed protein product [Homo sapiens] | gi\|229610526 |
| unnamed protein product [Homo sapiens] | gi\|213500113 |
| unnamed protein product [Homo sapiens] | gi\|210029289 |

[0555] Peptide Information

| | | | | Start | End | |
|---|---|---|---|---|---|---|
| Calc. Mass | Obsrv. Mass | ±da | ±ppm | Seq. | Seq. | Sequence |
| 923.5672 | 923.5703 | .0031 | 3 | 329 | 336 | IIAPPERK |
| 976.4483 | 976.4528 | .0045 | 5 | 19 | 28 | AGFAGDDAPR |
| 976.4483 | 976.4528 | .0045 | 5 | 19 | 28 | AGFAGDDAPR |
| 1132.527 | 1132.526 | −.001 | −1 | 197 | 206 | GYSFTTTAER |
| 1132.527 | 1132.526 | −.001 | −1 | 197 | 206 | GYSFTTTAER |
| 1198.7056 | 1198.7018 | −.0038 | −3 | 29 | 39 | AVFPSIVGRPR |
| 1198.7056 | 1198.7018 | −.0038 | −3 | 29 | 39 | AVFPSIVGRPR |
| 1354.6234 | 1354.6217 | −.0017 | −1 | 51 | 62 | DSYVGDEAQSKR |
| 1516.7028 | 1516.6896 | −.0132 | −9 | 360 | 372 | QEYDESGPSIVHR |
| 1516.7028 | 1516.6896 | −.0132 | −9 | 360 | 372 | QEYDESGPSIVHR |
| 1629.8231 | 1629.8079 | −.0152 | −9 | 197 | 210 | GYSFTTTAEREIVR |
| 1639.8361 | 1639.8278 | −.0083 | −5 | 178 | 191 | LDLAGRDLTDYLMK |
| 1790.892 | 1790.8685 | −.0235 | −13 | 239 | 254 | SYELPDGQVITIGN |
| | | | | | | ER |
| 1790.892 | 1790.8685 | −.0235 | −13 | 239 | 254 | SYELPDGQVITIGN |
| | | | | | | ER |
| 1954.0645 | 1954.0369 | −.0276 | −14 | 96 | 113 | VAPEEHPVLLT |
| | | | | | | EAPLNPK |
| 2231.0649 | 2231.0745 | .0096 | 4 | 292 | 312 | DLYANTVLSGG |
| | | | | | | TTMYPGI ADR |

POTE ankyrin domain family member E [Homo sapiens]

[0556] Protein Group

| | |
|---|---|
| | gi\|134133226 |
| Actin, beta [Homo sapiens] | gi\|16359158 |
| POTE ankyrin domain family member F [Homo sapiens] | gi\|153791352 |
| POTE-2 alpha-actin [Homo sapiens] | gi\|145309046 |
| PS1TP5-binding protein 1 [Homo sapiens] | gi\|93211215 |
| RecName: Full = POTE ankyrin domain family member | gi\|166898073 |
| E; AltName: Full = ANKRD26-like family C | |
| member 1A; AltName: Full = Prostate, ovary, | |
| testis-expressed | |
| protein | |
| on chromosome 2; | |
| Short = POTE-2 | |
| RecName: Full = POTE ankyrin domain family member | gi\|215273934 |
| F; AltName: Full = ANKRD26-like family C | |
| member 1B; AltName: Full = Chimeric POTE- | |
| actin | |
| protein | |
| beta actin variant [Homo sapiens] | gi\|62897671 |
| beta actin variant [Homo sapiens] | gi\|62897409 |
| beta actin variant [Homo sapiens] | gi\|62897625 |
| mutant beta-actin (beta′-actin) [Homo sapiens] | gi\|28336 |
| unnamed protein product [Homo sapiens] | gi\|194376310 |
| unnamed protein product [Homo sapiens] | |
| unnamed protein product [Homo sapiens] | gi\|66348792 |
| unnamed protein product [Homo sapiens] | gi\|28252 |
| unnamed protein product [Homo sapiens] | gi\|194375299 |
| unnamed protein product [Homo sapiens] | gi\|158257306 |

[0557] Peptide Information

| | | | | Start | End | |
|---|---|---|---|---|---|---|
| Calc. Mass | Obsrv. Mass | ±da | ±ppm | Seq. | Seq. | Sequence |
| 976.4483 | 976.4528 | .0045 | 5 | 719 | 728 | AGFAGDDAPR |
| 1198.7056 | 1198.7018 | −.0038 | −3 | 729 | 739 | AVFPSIVGRPR |
| 1516.7028 | 1516.6896 | −.0132 | −9 | 1060 | 1072 | QEYDESGPSIVHR |
| 1790.892 | 1790.8685 | −.0235 | −13 | 939 | 954 | SYELPDGQVITIGNER |

| | |
|---|---|
| Chain C, The Structure Of The Human Rnase H2 | gi\|312208155 |
| Complex Defines Key Interaction Interfaces | |
| Relevant | |
| To Enzyme Function And Human | |
| Disease | |

[0558] Protein Group

| | |
|---|---|
| AYP1 [Homo sapiens] | gi\|28628365 |
| AYP1 [Homo sapiens] | gi\|28628363 |
| AYP1 protein, isoform CRA_a [Homo sapiens] | gi\|119594839 |
| AYP1 protein, isoform CRA_b [Homo sapiens] | gi\|119594841 |
| AYP1 protein, isoform CRA_b [Homo sapiens] | gi\|119594840 |
| Chain F, The Structure Of The Human Rnase H2 | gi\|312208158 |
| Complex Defines Key Interaction Interfaces Relevant | |
| To Enzyme Function And Human | gi\|19421812 |
| Disease | |
| RNase H1 small subunit [Homo sapiens] | |
| RecName: Full = Ribonuclease H2 subunit C; | gi\|74730607 |
| Short = RNase H2 subunit C; AltName: | |
| Full = Aicardi-Goutieres syndrome 3 protein; | |
| Short = AGS3; AltName: Full = RNase H1 small | |
| subunit; | |
| AltName: Full = Ribonuclease HI subunit C | |
| Ribonuclease H2, subunit C [Homo sapiens] | gi\|23270834 |
| ribonuclease H2 subunit C [Homo sapiens] | gi\|38176285 |
| unnamed protein product [Homo sapiens] | gi\|194387324 |
| unnamed protein product [Homo sapiens] | gi\|10436946 |

[0559] Peptide Information

| | | | | Start | End | |
|---|---|---|---|---|---|---|
| Calc. Mass | Obsrv. Mass | ±da | ±ppm | Seq. | Seq. | Sequence |
| 1516.6809 | 1516.6896 | .0087 | 6 | 1 | 13 | MESGDEAAIERHR |

| | |
|---|---|
| baculoviral IAP repeat-containing 7 (livin), | gi\|119595708 |
| isoform | |
| CRA_a [Homo sapiens] | |

[0560] Protein Group

| | |
|---|---|
| Baculoviral IAP repeat-containing 7 [Homo sapiens] | gi\|15680241 |
| LIVIN [Homo sapiens] | gi\|37182790 |
| LIVIN [Homo sapiens] | gi\|37182788 |
| RecName: Full = Baculoviral IAP repeat-containing | gi\|21759008 |
| protein 7; AltName: Full = Kidney inhibitor of apoptosis | |
| protein; Short = KIAP; AltName: Full = Livin; AltName: | |
| Full = Melanoma inhibitor of apoptosis | |
| protein; Short = ML-IAP; AltName: | |
| Full = RING finger protein 50 | |
| baculoviral IAP repeat-containing 7 (livin) [Homo | gi\|13560105 |
| sapiens] | |
| baculoviral IAP repeat-containing 7 (livin) [Homo | gi\|13560104 |
| sapiens] | |
| baculoviral IAP repeat-containing 7 (livin), isoform | gi\|119595709 |
| CRA_b [Homo sapiens] | |
| baculoviral IAP repeat-containing 7 [Homo sapiens] | gi\|41387695 |
| baculoviral IAP repeat-containing protein 7 isoform | gi\|21536421 |
| alpha [Homo sapiens] | |
| baculoviral IAP repeat-containing protein 7 isoform beta | gi\|11545910 |
| [Homo sapiens] | |
| inhibitor of apoptosis [Homo sapiens] | gi\|13785205 |
| inhibitor of apoptosis [Homo sapiens] | gi\|13785204 |
| inhibitor of apoptosis protein KIAP [Homo sapiens] | gi\|11545503 |
| livin inhibitor-of-apotosis [Homo sapiens] | gi\|11245453 |

[0561] Peptide Information

| Calc. Mass | Obsrv. Mass | ±da | ±ppm | Start Seq. | End Seq. | Sequence |
|---|---|---|---|---|---|---|
| 1790.8206 | 1790.8685 | .0479 | 27 | 13 | 29 | GPQPSHWAA |
| | | | | | | GDGPTQE R |

| | |
|---|---|
| PREDICTED: hypothetical protein LOC100507747 | gi\|310110557 |
| [Homo sapiens] | |

[0562] Protein Group

| | |
|---|---|
| PREDICTED: hypothetical protein LOC100510580 | gi\|310129761 |
| [Homo sapiens] | |
| hCG2012269 [Homo sapiens] | gi\|119629636 |
| unnamed protein product [Homo sapiens] | gi\|21751293 |

[0563] Peptide Information

| Calc. | Obsrv. | | | Start | End | |
|---|---|---|---|---|---|---|
| Mass | Mass | +da | +ppm | Seq. | Seq. | Sequence |
| 1132.5164 | 1132.526 | .0096 | 8 | 365 | 374 | CSSSPRDAP |
| | | | | | | R |

| | |
|---|---|
| unnamed protein product | gi\|40042332 |
| [Homo sapiens] | |

[0564] Peptide Information

| Calc. | Obsrv. | | | Start | End | |
|---|---|---|---|---|---|---|
| Mass | Mass | ±da | ±ppm | Seq. | Seq. | Sequence |
| 1132.5454 | 1132.52 | — | — | 6 | 75 | GGSNXSSPSRR |

| | |
|---|---|
| unnamed protein product [Homo sapiens] | gi\|40979948 |

[0565] Peptide Information

| Calc. | Obsrv. | | | Start | End | |
|---|---|---|---|---|---|---|
| Mass | Mass | ±da | ±ppm | Seq. | Seq. | Sequence |
| 1132.6045 | 1132.526 | −.0785 | −69 | 71 | 79 | HRMFSLIGR |

| | |
|---|---|
| PREDICTED: hypothetical protein | gi\|310132586 |
| LOC100508234 | |
| [Homo sapiens] | |

[0566] Protein Group

| | |
|---|---|
| PREDICTED: hypothetical protein LOC100127987 | gi\|169212748 |
| [Homo sapiens] | |
| PREDICTED: hypothetical protein LOC100508234 | gi\|310113267 |
| [Homo sapiens] | |
| hCG1645807 [Homo sapiens] | gi\|119587028 |

[0567] Peptide Information

| Calc. | Obsrv. | | | Start | End | |
|---|---|---|---|---|---|---|
| Mass | Mass | ±da | ±ppm | Seq. | Seq. | Sequence |
| 976.4846 | 976.4528 | −.0318 | −33 | 160 | 168 | SLSGSSPWR |

| | |
|---|---|
| F-box and leucine-rich repeat protein | gi\|119609335 |
| 14, isoform | |
| CRA_b [Homo sapiens] | |

[0568] Protein Group

| | |
|---|---|
| F-box and leucine-rich repeat protein 14 [Homo | gi\|20381419 |
| sapiens] | |
| F-box and leucine-rich repeat protein 14, isoform | gi\|119609334 |
| CRA_a [Homo sapiens] | |
| F-box and leucine-rich repeat protein 14, isoform | gi\|119609336 |
| CRA_c [Homo sapiens] | |
| F-box/LRR-repeat protein 14 [Homo sapiens] | gi\|22748931 |
| RecName: Full = F-box/LRR-repeat protein 14; | gi\|48428083 |
| AltName: Full = F-box and leucine-rich repeat protein 14 | |

[0569] Peptide Information

| Calc. | Obsrv. | | | Start | End | |
|---|---|---|---|---|---|---|
| Mass | Mass | ±da | ±ppm | Seq. | Seq. | Sequence |
| 976.5058 | 976.4528 | −.053 | −54 | 129 | 137 | QITDSSLGR |

| | |
|---|---|
| hsp90 co-chaperone Cdc37-like 1 | gi\|66773038 |
| [Homo sapiens] | |

[0570] Protein Group

| | |
|---|---|
| CDC37 cell division cycle 37 homolog | gi\|119579186 |
| (S. cerevisiae)-like 1 [Homo sapiens] | |
| Cell division cycle 37 homolog (S. cerevisiae)-like 1 | gi\|15559546 |
| [Homo sapiens] | |
| RecName: Full = Hsp90 co-chaperone Cdc37-like 1; | gi\|182705252 |
| AltName: Full = Hsp90-associating relative of Cdc37 | |
| cell division cycle 37 homolog (S. cerevisiae)-like 1 | gi\|57208646 |
| [Homo sapiens] | |
| cell division cycle 37 homolog (S. cerevisiae)-like 1 | gi\|10696978 |
| [Homo sapiens] | |
| unnamed protein product [Homo sapiens] | gi\|7020874 |
| unnamed protein product [Homo sapiens] | gi\|40044754 |

[0571] Peptide Information

| | | | | | | |
|---|---|---|---|---|---|---|
| | Obsrv. | | | Start | End | |
| Calc. Mass | Mass | +da | +ppm | Seq. | Seq. | Sequence |

| | |
|---|---|
| collagen, type VI, alpha 2, isoform | gi\|119629722 |
| CRA_b [Homo sapiens] | |

[0572] Protein Group

| | |
|---|---|
| Collagen, type VI, | gi\|41350923 |
| alpha 2 [Homo | |
| RecName: Full = Collagen alpha-2(VI) | gi\|125987 |
| Precursor | |
| [Homo sapiens] | |
| [Homo sapiens] | |
| [Homo sapiens] | |
| collagen type VI alpha 2(VI) chain | gi\|242005 |
| sapiens] | |
| sapiens] | |
| sapiens] | |

[0573] Peptide Information

| Calc. | Obsrv. | | | Star | En | |
|---|---|---|---|---|---|---|
| Mass | Mass | ±da | ±ppm | Seq. | Seq. | Sequence |
| 1132.5746 | 1132.526 | −.0486 | — | 54 | 550 | GDFGLKGEPGR |

| | |
|---|---|
| arginine-rich | gi\|284164 |
| protein- | gi\|178991 |
| arginine-rich protein [Homo sapiens] | |

[0574] Peptide Information

| Calc. | Obsrv. | | | Start | End | |
|---|---|---|---|---|---|---|
| Mass | Mass | ±da | ±ppm | Seq. | Seq. | Sequence |
| 1132.5933 | 1132.526 | −.0673 | −59 | 56 | 65 | MWATQGLAV |
| | | | | | | R |

| | |
|---|---|
| Nuraminidase [Homo sapiens] | gi\|8919622 |

[0575] Peptide Information

| Calc. | Obsrv. | | | Start | End | |
|---|---|---|---|---|---|---|
| Mass | Mass | ±da | ±ppm | Seq. | Seq. | Sequence |
| 976.5244 | 976.4528 | −.0716 | −73 | 130 | 138 | SSLLGACLR |

| | |
|---|---|
| coiled-coil-helix-coiled-coil-helix | gi\|119604206 |
| domain containing 3, isoform CRA_a | |
| [Homo sapiens] | |

[0576] Peptide Information

| Calc. | Obsrv. | | | Start | End | |
|---|---|---|---|---|---|---|
| Mass | Mass | ±da | ±ppm | Seq. | Seq. | Sequence |
| 1132.5647 | 1132.526 | −.0387 | −34 | 6 | 13 | NSWLDWRR |

| | |
|---|---|
| hCG2011944 [Homo sapiens] | gi\|119629431 |

[0577] Peptide Information

| | | | | | End | |
|---|---|---|---|---|---|---|
| Calc. Mass | Obsrv. Mass | ±da | ±ppm | Start Seq. | Seq. | Sequence |
| 1132.6144 | 1132.526 | −.0884 | −78 | 35 | 44 | VCLNTSILGR |

| | |
|---|---|
| unknown [Homo | gi\|17104821 |
| sapiens] | |

[0578] Protein Group

| | |
|---|---|
| RecName: Full = Putative uncharacterized protein | gi\|74751647 |
| C9orf130; | |
| AltName: | |
| Full = Nasopharyngeal | |
| carcinoma-associated gene 12 protein | |
| hCG2003678 [Homo sapiens] | gi\|119613040 |

[0579] Peptide Information

| Calc. | Obsrv. | | | Start | End | |
|---|---|---|---|---|---|---|
| Mass | Mass | ±da | ±ppm | Seq. | Seq. | Sequence |
| 976.488 | 976.4528 | −.0352 | −36 | 61 | 69 | CSPSSLGLR |

4—AFCC—from Fraction 33

[0580] 2 new found proteins which have been named KH19 (SEQ ID NO. KH19) and KH20(SEQ ID NO. KH20) and its functions are under investigation.

| | |
|---|---|
| IPI00893699 | Tax_Id = 9606 Gene_Symbol = C1D 20 kDa protein |

[0581] KH19 (SEQ ID NO. KH19) Peptide Information

| Calc. | Obsrv. | | | | | |
|---|---|---|---|---|---|---|
| Mass | Mass | ±da | ±ppm | Seq. | Seq. | Sequence |
| 811.3801 | 811.4196 | 0.0395 | 49 | 73 | 79 | TMMSVSR |
| 827.3749 | 827.4133 | 0.0384 | 46 | 73 | 79 | TMMSVSR |
| 831.4683 | 831.4334 | −0.0349 | −42 | 168 | 175 | NASKVANK |
| 835.4785 | 835.4451 | −0.0334 | −40 | 151 | 158 | GAASRF |
| | | | | | | VK |
| 857.4515 | 857.4796 | 0.0281 | 33 | 159 | 165 | NALWEPK |
| 913.4989 | 913.5715 | 0.0726 | 79 | 86 | 93 | LDPLEQ |
| | | | | | | AK |
| 913.4989 | 913.5715 | 0.0726 | 79 | 86 | 93 | LDPLEQ |
| | | | | | | AK |
| 1231.6833 | 1231.7903 | 0.107 | 87 | 156 | 165 | FVKNAL |
| | | | | | | WEPK |

| | |
|---|---|
| IPI00218730 | Tax_Id = 9606 Gene_Symbol = PDE6A Rod |
| | cGMP-specific 3′,5′-cyclic |
| | phosphodiesterase subunit alpha |

[0582] KH20 (SEQ ID NO. KH20) Peptide Information

| | | | | Start | End | |
|---|---|---|---|---|---|---|
| Calc. Mass | Obsrv. Mass | ±da | ±ppm | Seq. | Seq. | Sequence |
| 813.4141 | 813.4094 | −0.0047 | −6 | 312 | 317 | EINFYK |
| 817.4526 | 817.4706 | 0.018 | 22 | 828 | 834 | QKQQSAK |
| 817.4526 | 817.4706 | 0.018 | 22 | 828 | 834 | QKQQSAK |
| 826.424 | 826.3994 | −0.0246 | −30 | 678 | 683 | RTMFQK |
| 826.424 | 826.3994 | −0.0246 | −30 | 678 | 683 | RTMFQK |
| 859.4771 | 859.498 | 0.0209 | 24 | 207 | 213 | DEEILLK |
| 867.4471 | 867.4705 | 0.0234 | 27 | 630 | 636 | HHLEFGK |
| 891.4604 | 891.451 | −0.0094 | −11 | 820 | 826 | MKVQEEK |
| 895.4091 | 895.3915 | −0.0176 | −20 | 268 | 274 | AFLNCDR |
| 963.4426 | 963.4947 | 0.0521 | 54 | 94 | 100 | MSLFMYR |
| 1209.674 | 1209.7273 | 0.0533 | 44 | 535 | 544 | FHIPQEALVR |
| 1320.614 | 1320.6102 | −0.0038 | −3 | 373 | 383 | EPLDESGWMIK |
| 1350.7642 | 1350.7184 | −0.0458 | −34 | 630 | 640 | HHLEFGKTLLR |
| 1350.7642 | 1350.7184 | −0.0458 | −34 | 630 | 640 | HHLEFGKTLLR |
| 1852.0004 | 1852.0034 | 0.003 | | 2312 | 326 | EINFYKVIDYILH |
| | | | | | | GK |

| | |
|---|---|
| IPI00744887 | Tax_Id = 9606 Gene_Symbol = PLCH2 |
| | Isoform 3 of 1-phosphatidylinositol-4,5-bisphosphate |
| | phosphodiesterase eta-2 |

[0583] Peptide Information

| | | | | | End | |
|---|---|---|---|---|---|---|
| Calc. Mass | Obsrv. Mass | ±da | ±ppm | Start Seq. | Seq. | Sequence |
| 808.4498 | 808.402 | −0.0478 | −59 | 210 | 215 | VKQMFR |
| 809.3458 | 809.4174 | 0.0716 | 88 | 739 | 745 | DSMLGDR |
| 813.3705 | 813.4094 | 0.0389 | 48 | 237 | 242 | MMSTRR |
| 817.4526 | 817.4706 | 0.018 | 22 | 513 | 519 | VENTAKR |
| 817.4526 | 817.4706 | 0.018 | 22 | 512 | 518 | RVENTAK |
| 824.4447 | 824.4203 | −0.0244 | −30 | 210 | 215 | VKQMFR |
| 827.4846 | 827.4133 | −0.0713 | −86 | 1253 | 1260 | VSGPGVRR |
| 828.4799 | 828.4109 | −0.069 | −83 | 900 | 906 | SQKPGRR |
| 831.4683 | 831.4334 | −0.0349 | −42 | 892 | 899 | RTASAPTK |
| 856.5615 | 856.5053 | −0.0562 | −66 | 852 | 859 | VKQALGLK |
| 891.4934 | 891.451 | −0.0424 | −48 | 266 | 272 | FLQVEQK |
| 915.5006 | 915.4615 | −0.0391 | −43 | 1164 | 1171 | SKSNPNLR |
| 1350.7601 | 1350.7184 | −0.0417 | −31 | 1240 | 1252 | LSHSLGLPG |
| | | | | | | GTRR |
| 1350.7601 | 1350.7184 | −0.0417 | −31 | 1239 | 1251 | RLSHSLGLP |
| | | | | | | GGTR |
| 1556.7261 | 1556.8342 | 0.1081 | 69 | 152 | 165 | YLMAGISDE |
| | | | | | | DSLAR |

| | |
|---|---|
| IPI00968198 | Tax_Id = 9606 Gene_Symbol = PACRGL |
| | Uncharacterized protein |

[0584] Peptide Information

| | | | | Start | End | |
|---|---|---|---|---|---|---|
| Calc. Mass | Obsrv. Mass | ±da | ±ppm | Seq. | Seq. | Sequence |
| 851.4469 | 851.4418 | −0.0051 | −6 | 24 | 31 | TSSSTQLK |
| 963.4741 | 963.4947 | 0.0206 | 21 | 4 | 13 | SEGSGGTQLK |
| 1350.6682 | 1350.7184 | 0.0502 | 37 | 1 | 13 | MQKSEGSGGT |
| | | | | | | QLK |
| 1350.6682 | 1350.7184 | 0.0502 | 37 | 1 | 13 | MQKSEGSGGT |
| | | | | | | QLK |
| 2283.1768 | 2283.4019 | 0.2251 | 99 | 66 | 86 | TINPFGEQSRV |
| | | | | | | PSAFAAI |
| | | | | | | YSK |

| | |
|---|---|
| IPI00964698 | Tax_Id = 9606 Gene_Symbol = PACRGL |
| | Uncharacterized protein |

[0585] Peptide Information

| | | | | Start | End | |
|---|---|---|---|---|---|---|
| Calc. Mass | Obsrv. Mass | ±da | ±ppm | Seq. | Seq. | Sequence |
| 851.4469 | 851.4418 | −0.0051 | −6 | 24 | 31 | TSSSTQLK |
| 963.4741 | 963.4947 | 0.0206 | 21 | 4 | 13 | SEGSGGTQLK |
| 1350.6682 | 1350.7184 | 0.0502 | 37 | 1 | 13 | MQKSEGSGGT |
| | | | | | | QLK |
| 1350.6682 | 1350.7184 | 0.0502 | 37 | 1 | 13 | MQKSEGSGGT |
| | | | | | | QLK |
| 2283.1768 | 2283.4019 | 0.2251 | 99 | 66 | 86 | TINPFGEQSRV |
| | | | | | | PSAFAAI YSK |

| | |
|---|---|
| IPI00964149 | Tax_Id = 9606 Gene_Symbol = PACRGL |
| | Uncharacterized protein |

[0586] Peptide Information

| | | | | Start | End | |
|---|---|---|---|---|---|---|
| Calc. Mass | Obsrv. Mass | ±da | ±ppm | Seq. | Seq. | Sequence |
| 851.4469 | 851.4418 | −0.0051 | −6 | 24 | 31 | TSSSTQLK |
| 963.4741 | 963.4947 | 0.0206 | 21 | 4 | 13 | SEGSGGTQLK |
| 1350.6682 | 1350.7184 | 0.0502 | 37 | 1 | 13 | MQKSEGSGGT |
| | | | | | | QLK |
| 1350.6682 | 1350.7184 | 0.0502 | 37 | 1 | 13 | MQKSEGSGGT |
| | | | | | | QLK |
| 1657.7817 | 1657.8608 | 0.0791 | 48 | 66 | 79 | TINPVHSDDEV |
| | | | | | | FER |

| | |
|---|---|
| IPI00654552 | Tax_Id = 9606 Gene_Symbol = PLCH2 |
| | Isoform 1 of 1-phosphatidylinositol-4,5-bisphosphate |
| | phosphodiesterase eta-2 |

[0587] Peptide Information

| | | | | Start | End | |
|---|---|---|---|---|---|---|
| Calc. Mass | Obsrv. Mass | ±da | ±ppm | Seq. | Seq. | Sequence |
| 808.4498 | 808.402 | −0.0478 | −59 | 210 | 215 | VKQMFR |
| 809.3458 | 809.4174 | 0.0716 | 88 | 775 | 781 | DSMLGDR |
| 813.3705 | 813.4094 | 0.0389 | 48 | 237 | 242 | MMSTRR |
| 817.4526 | 817.4706 | 0.018 | 22 | 513 | 519 | VENTAKR |
| 817.4526 | 817.4706 | 0.018 | 22 | 512 | 518 | RVENTAK |
| 824.4447 | 824.4203 | −0.0244 | −30 | 210 | 215 | VKQMFR |
| 827.4846 | 827.4133 | −0.0713 | −86 | 1289 | 1296 | VSGPGVRR |
| 828.4799 | 828.4109 | −0.069 | −83 | 936 | 942 | SQKPGRR |
| 831.4683 | 831.4334 | −0.0349 | −42 | 928 | 935 | RTASAPTK |
| 856.5615 | 856.5053 | −0.0562 | −66 | 888 | 895 | VKQALGLK |
| 891.4934 | 891.451 | −0.0424 | −48 | 266 | 272 | FLQVEQK |
| 915.5006 | 915.4615 | −0.0391 | −43 | 1200 | 1207 | SKSNPNLR |
| 1350.7601 | 1350.7184 | −0.0417 | −31 | 1276 | 1288 | LSHSLGLPGGT |
| | | | | | | RR |
| 1350.7601 | 1350.7184 | −0.0417 | −31 | 1275 | 1287 | RLSHSLGLPGG |
| | | | | | | TR |
| 1556.7261 | 1556.8342 | 0.1081 | 69 | 152 | 165 | YLMAGISDEDS |
| | | | | | | LAR |

| | |
|---|---|
| IPI00478966 | Tax_Id = 9606 |
| | Gene_Symbol = PFKFB3 |
| | Uncharacterized protein |

[0588] Peptide Information

| | | | | Start | End | |
|---|---|---|---|---|---|---|
| Calc. Mass | Obsrv. Mass | ±da | ±ppm | Seq. | Seq. | Sequence |
| 825.4287 | 825.4099 | −0.0188 | −23 | 9 | 14 | TIYLCR |
| 837.4061 | 837.4302 | 0.0241 | 29 | 180 | 187 | SSADSSRK |
| 851.4985 | 851.4418 | −0.0567 | −67 | 38 | 45 | KFASALSK |
| 861.4828 | 861.4011 | −0.0817 | −95 | 57 | 63 | VWTSQLK |
| 963.4934 | 963.4947 | 0.0013 | 1 | 74 | 80 | LPYEQWK |
| 1245.6951 | 1245.7703 | 0.0752 | 60 | 54 | 63 | DLRVWTSQLK |

| | |
|---|---|
| IPI00247814 | Tax_Id = 9606 Gene_Symbol = NOTO |
| | Homeobox protein notochord |

[0589] Peptide Information

| Calc. | Obsrv. | | | Start | End | |
|---|---|---|---|---|---|---|
| Mass | Mass | ±da | ±ppm | Seq. | Seq. | Sequence |
| 822.4468 | 822.3993 | −0.0475 | −58 | 211 | 216 | YQKQQK |
| 827.4482 | 827.4133 | −0.0349 | −42 | 24 | 31 | SGRSPAPR |
| 849.4366 | 849.4159 | −0.0207 | −24 | 202 | 207 | VWFQNR |
| 856.4457 | 856.5053 | 0.0596 | 70 | 1 | 7 | MPSPRPR |
| 859.4632 | 859.498 | 0.0348 | 40 | 195 | 201 | LTENQVR |
| 870.5519 | 870.5197 | −0.0322 | −37 | 187 | 194 | AQLAARLK |
| 870.5519 | 870.5197 | −0.0322 | −37 | 187 | 194 | AQLAARLK |

| | |
|---|---|
| IPI00921826 | Tax_Id = 9606 |
| | Gene_Symbol = CHCHD |
| | 3 cDNA FLJ53726, |
| | highly similar to |
| | Coiled-coil-helix-coiled-coil- |
| | helixdomain-containing |
| | protein 3 |

[0590] Peptide Information

| Calc. | Obsrv. | | | Start | End | |
|---|---|---|---|---|---|---|
| Mass | Mass | ±da | ±ppm | Seq. | Seq. | Sequence |
| 817.4162 | 817.4706 | 0.0544 | 67 | 90 | 95 | ELDRER |
| 817.4162 | 817.4706 | 0.0544 | 67 | 90 | 95 | ELDRER |
| 826.3724 | 826.3994 | 0.027 | 33 | 1 | 8 | MGGTTSTR |
| 826.3724 | 826.3994 | 0.027 | 33 | 1 | 8 | MGGTTSTR |
| 835.438 | 835.4451 | 0.0071 | 8 | 2 | 9 | GGTTSTRR |
| 848.4108 | 848.3859 | −0.0249 | −29 | 113 | 119 | SEEERAK |
| 859.4631 | 859.498 | 0.0349 | 41 | 87 | 93 | QAKELDR |

| | |
|---|---|
| IPI00893693 | Tax_Id = 9606 Gene_Symbol = |
| | CCDC88A 137 kDa protein |

[0591] Peptide Information

| | | | | Start | End | |
|---|---|---|---|---|---|---|
| Calc. Mass | Obsrv. Mass | ±da | ±ppm | Seq. | Seq. | Sequence |
| 879.4968 | 879.4153 | −0.0815 | −93 | 635 | 642 | KSSMVALK |
| 880.5138 | 880.4396 | −0.0742 | −84 | 129 | 135 | YKLLESK |
| 896.4584 | 896.4399 | −0.0185 | −21 | 365 | 371 | NLEVEHR |
| 985.5789 | 985.582 | 0.0031 | 3 | 16 | 23 | LRQQAEIK |
| 985.5789 | 985.582 | 0.0031 | 3 | 16 | 23 | LRQQAEIK |
| 1021.5272 | 1021.5333 | 0.0061 | 6 | 961 | 969 | ESSLSRQSK |
| 1021.5425 | 1021.5333 | −0.0092 | −9 | 178 | 185 | NYEALKQR |
| 1187.6267 | 1187.6656 | 0.0389 | 33 | 383 | 392 | QKGQLEDLEK |
| | 1187.6656 | | | | | |
| 1187.6267 | 1187.6656 | 0.0389 | 33 | 383 | 392 | QKGQLEDLEK |
| 1199.5903 | 1199.6674 | 0.0771 | 64 | 435 | 444 | ETEVLQTDHK |
| 1254.6212 | 1254.6615 | 0.0403 | 32 | 345 | 355 | QASEYESLISK |
| 1406.7274 | 1406.6833 | −0.0441 | −31 | 372 | 382 | DLEDRYNQLLK |
| 1406.7274 | 1406.6833 | −0.0441 | −31 | 372 | 382 | DLEDRYNQLLK |
| 1428.6754 | 1428.7153 | 0.0399 | 28 | 909 | 921 | SVSGKTPGDFY |
| | | | | | | DR |
| 1479.6996 | 1479.7794 | 0.0798 | 54 | 875 | 887 | SSSQENLLDEV |
| | | | | | | MK |
| 1502.8425 | 1502.8582 | 0.0157 | 10 | 78 | 90 | TLVTLREDLVSEK |
| 1727.9286 | 1727.8947 | −0.0339 | −20 | 223 | 237 | LIEVERNNATLQ |
| | | | | | | AEK |
| 2213.1084 | 2213.2441 | 0.1357 | 61 | 935 | 955 | KTEDTYFISSAG |
| | | | | | | KPTPGT |
| | | | | | | QGK |
| 2233.0918 | 2233.0076 | −0.0842 | −38 | 515 | 532 | TLLEQNMESKD |
| | | | | | | LFHVEQR |
| 2233.0918 | 2233.2017 | 0.1099 | 49 | 515 | 532 | TLLEQNMESKD |
| | | | | | | LFHVEQR |

| | |
|---|---|
| IPI01012199 | Tax_Id = 9606 Gene_Symbol = MACF1 |
| | Uncharacterized protein |

[0592] Protein Group

| | |
|---|---|
| IPI00256861 | Tax_Id = 9606 Gene_Symbol = MACF1 Isoform 2 of |
| | Microtubule-actin cross-linking factor 1, isoforms 1/2/3/5 |

[0593] Peptide Information

| | | | | Start | End | |
|---|---|---|---|---|---|---|
| Calc. Mass | Obsrv. Mass | ±da | ±ppm | Seq. | Seq. | Sequence |
| 870.5229 | 870.5385 | 0.0156 | 18 | 3736 | 3743 | LMALGPIR |
| 870.5229 | 870.5385 | 0.0156 | 18 | 3736 | 3743 | LMALGPIR |
| 879.4935 | 879.4153 | −0.0782 | −89 | 1874 | 1881 | FVTISGQK |
| 880.441 | 880.4396 | −0.0014 | −2 | 2240 | 2246 | DFTELQK |
| 910.4265 | 910.4448 | 0.0183 | 20 | 3476 | 3482 | YSEIQDR |
| 910.4265 | 910.4448 | 0.0183 | 20 | 3476 | 3482 | YSEIQDR |
| 928.4669 | 928.4629 | −0.004 | −4 | 3652 | 3658 | KEVMEHR |
| 1021.5499 | 1021.5333 | −0.0166 | −16 | 2551 | 2558 | QQVQFMLK |
| 1021.5499 | 1021.5333 | −0.0166 | −16 | 2551 | 2558 | QQVQFMLK |
| 1106.5034 | 1106.5583 | 0.0549 | 50 | 1018 | 1026 | LEEEVEACK |
| 1170.6841 | 1170.6443 | −0.0398 | −34 | 3312 | 3321 | VVKAQIQEQK |
| 1187.6201 | 1187.6656 | 0.0455 | 38 | 2757 | 2766 | NCPISAKLER |
| 1187.6201 | 1187.6656 | 0.0455 | 38 | 2757 | 2766 | NCPISAKLER |
| 1199.6896 | 1199.6674 | −0.0222 | −19 | 3758 | 3767 | AFSIDIIRHK |
| 1257.6797 | 1257.6525 | −0.0272 | −22 | 1506 | 1516 | QISEQLNALNK |
| 1257.6797 | 1257.6525 | −0.0272 | −22 | 1506 | 1516 | QISEQLNALNK |
| 1261.694 | 1261.6499 | −0.0441 | −35 | 380 | 389 | LLEVWIEFGR |
| 1287.6791 | 1287.6593 | −0.0198 | −15 | 4662 | 4672 | EKTLLPEDSQK |
| 1320.7271 | 1320.6016 | −0.1255 | −95 | 1870 | 1881 | GDLRFVTISGQK |
| 1406.7386 | 1406.6833 | −0.0553 | −39 | 4647 | 4658 | QPVYDTTIRTGR |
| 1406.7386 | 1406.6833 | −0.0553 | −39 | 4647 | 4658 | QPVYDTTIRTGR |
| 1413.7809 | 1413.8057 | 0.0248 | 18 | 3156 | 3167 | ARQEQLELTLGR |
| 1420.7213 | 1420.6881 | −0.0332 | −23 | 2940 | 2951 | TGSLEEMTQRLR |
| 1425.7156 | 1425.8075 | 0.0919 | 64 | 869 | 880 | NTISVKAVCDYR |
| 1428.7693 | 1428.7153 | −0.054 | −38 | 5052 | 5063 | LNDALDRLEELK |
| 1465.7281 | 1465.7726 | 0.0445 | 30 | 4428 | 4439 | EETYNQLLDKGR |
| 1465.7316 | 1465.7726 | 0.041 | 28 | 4440 | 4453 | LMLLSRDDSGS |
| | | | | | | GSK |
| 1487.7952 | 1487.7654 | −0.0298 | −20 | 3565 | 3577 | QTTGEEVLLIQ |
| | | | | | | EK |
| 1502.873 | 1502.8582 | −0.0148 | −10 | 380 | 391 | LLEVWIEFGRIK |
| 1532.6785 | 1532.7728 | 0.0943 | 62 | 3891 | 3903 | ELNPEEGEMVE |
| | | | | | | EK |
| 1713.8728 | 1713.8539 | −0.0189 | −11 | 3123 | 3137 | HMLEEEGTLDL |
| | | | | | | LGLK |
| 1727.9149 | 1727.8947 | −0.0202 | −12 | 2151 | 2165 | KLLPQAEMFEH |
| | | | | | | LSGK |
| 1794.9636 | 1794.8103 | −0.1533 | −85 | 5106 | 5121 | QEFIDGILASKF |
| | | | | | | PTTK |
| 1838.8412 | 1838.927 | 0.0858 | 47 | 4960 | 4974 | ALIAEHQTFME |
| | | | | | | EMTR |
| 2186.155 | 2185.9851 | −0.1699 | −78 | 1958 | 1978 | LLSDTVASDPG |
| | | | | | | VLQEQLA |
| | | | | | | TTK |
| 2202.1799 | 2201.9719 | −0.208 | −94 | 2864 | 2882 | MSELRVTLDPV |
| | | | | | | QLESSLLR |
| | | | | | | EALAGLLVTYP |
| 2233.1135 | 2233.0076 | −0.1059 | −47 | 2462 | 2481 | NSQEAEN |
| | | | | | | WK |
| 2233.1135 | 2233.2017 | 0.0882 | 39 | 2462 | 2481 | EALAGLLVTYP |
| | | | | | | NSQEAEN |
| | | | | | | WK |
| 2299.0217 | 2299.144 | 0.1223 | 53 | 3068 | 3088 | EMFSQLADLDD |
| | | | | | | ELDGMG |
| | | | | | | AIGR |

| | |
|---|---|
| IPI00982053 | Tax_Id = 9606 |
| | Gene_Symbol = TSSK6 Conserved |
| | hypothetical |
| | protein |

[0594] Peptide Information

| | | | | Start | End | |
|---|---|---|---|---|---|---|
| Calc. Mass | Obsrv. Mass | ±da | ±ppm | Seq. | Seq. | Sequence |
| 856.4999 | 856.5223 | 0.0224 | 26 | 89 | 97 | AAQIAGAVR |
| 879.4907 | 879.4153 | −0.0754 | −86 | 55 | 62 | ATPAHRAR |
| 880.3876 | 880.4396 | 0.052 | 59 | 267 | 273 | GNMRSCR |
| 896.3825 | 896.4399 | 0.0574 | 64 | 267 | 273 | GNMRSCR |
| 912.4574 | 912.4597 | 0.0023 | 3 | 125 | 132 | LTDFGFGR |
| 1187.6136 | 1187.6656 | 0.052 | 44 | 271 | 279 | SCRVLLHMR |
| 1187.6136 | 1187.6656 | 0.052 | 44 | 271 | 279 | SCRVLLHMR |
| 1332.6768 | 1332.6146 | −0.0622 | −47 | 26 | 40 | GHQGGGPAAS |
| | | | | | | APGLR |
| 1413.771 | 1413.8057 | 0.0347 | 25 | 148 | 160 | GAPGHPLRPQ |
| | | | | | | EVR |
| 1487.7272 | 1487.7654 | 0.0382 | 26 | 111 | 122 | CENVLLSPDERR |
| 2299.2095 | 2299.144 | −0.0655 | −28 | 240 | 260 | LEAGWFQPFL |
| | | | | | | QPRALGQ |
| | | | | | | GGAR |

| | |
|---|---|
| IPI01018834 | Tax_Id = 9606 Gene_Symbol = MACF1 |
| | Uncharacterized protein |

[0595] Protein Group

| | |
|---|---|
| IPI00478226 | Tax_Id = 9606 Gene_Symbol = MACF1 Isoform 5 of |
| | Microtubule-actin cross-linking factor 1, isoforms 1/2/3/5 |

[0596] Peptide Information

| | | | | Start | End | |
|---|---|---|---|---|---|---|
| Calc. Mass | Obsrv. Mass | ±da | ±ppm | Seq. | Seq. | Sequence |
| 870.5229 | 870.5385 | 0.0156 | 18 | 3606 | 3613 | LMALGPIR |
| 870.5229 | 870.5385 | 0.0156 | 18 | 3606 | 3613 | LMALGPIR |
| 879.4935 | 879.4153 | −0.0782 | −89 | 1874 | 1881 | FVTISGQK |
| 880.441 | 880.4396 | −0.0014 | −2 | 2240 | 2246 | DFTELQK |
| 928.4669 | 928.4629 | −0.004 | −4 | 3522 | 3528 | KEVMEHR |
| 1021.5499 | 1021.5333 | −0.0166 | −16 | 2530 | 2537 | QQVQFMLK |
| 1021.5499 | 1021.5333 | −0.0166 | −16 | 2530 | 2537 | QQVQFMLK |
| 1106.5034 | 1106.5583 | 0.0549 | 50 | 1018 | 1026 | LEEEVEACK |
| 1170.6841 | 1170.6443 | −0.0398 | −34 | 3291 | 3300 | VVKAQIQEQK |
| 1187.6201 | 1187.6656 | 0.0455 | 38 | 2736 | 2745 | NCPISAKLER |
| 1187.6201 | 1187.6656 | 0.0455 | 38 | 2736 | 2745 | NCPISAKLER |
| 1199.6896 | 1199.6674 | −0.0222 | −19 | 3628 | 3637 | AFSIDIIRHK |
| 1257.6797 | 1257.6525 | −0.0272 | −22 | 1506 | 1516 | QISEQLNA |
| | | | | | | LNK |
| 1257.6797 | 1257.6525 | −0.0272 | −22 | 1506 | 1516 | QISEQLNA |
| | | | | | | LNK |
| 1261.694 | 1261.6499 | −0.0441 | −35 | 380 | 389 | LLEVWIEF |
| | | | | | | GR |
| 1287.6791 | 1287.6593 | −0.0198 | −15 | 4532 | 4542 | EKTLLPED |
| | | | | | | SQK |
| 1320.7271 | 1320.6016 | −0.1255 | −95 | 1870 | 1881 | GDLRFVTI |
| | | | | | | SGQK |
| 1406.7386 | 1406.6833 | −0.0553 | −39 | 4517 | 4528 | QPVYDTTI |
| | | | | | | RTGR |
| 1406.7386 | 1406.6833 | −0.0553 | −39 | 4517 | 4528 | QPVYDTTI |
| | | | | | | RTGR |
| 1413.7809 | 1413.8057 | 0.0248 | 18 | 3135 | 3146 | ARQEQLE |
| | | | | | | LTLGR |
| 1420.7213 | 1420.6881 | −0.0332 | −23 | 2919 | 2930 | TGSLEEMTQRLR |
| 1425.7156 | 1425.8075 | 0.0919 | 64 | 869 | 880 | NTISVKAVCDYR |
| 1428.7693 | 1428.7153 | −0.054 | −38 | 4922 | 4933 | LNDALDRLEELK |
| 1465.7281 | 1465.7726 | 0.0445 | 30 | 4298 | 4309 | EETYNQLLDKGR |
| 1465.7316 | 1465.7726 | 0.041 | 28 | 4310 | 4323 | LMLLSRDDSGS |
| | | | | | | GSK |
| 1487.7952 | 1487.7654 | −0.0298 | −20 | 3435 | 3447 | QTTGEEVLLIQ |
| | | | | | | EK |
| 1502.873 | 1502.8582 | −0.0148 | −10 | 380 | 391 | LLEVWIEFGRIK |
| 1532.6785 | 1532.7728 | 0.0943 | 62 | 3761 | 3773 | ELNPEEGEMVE |
| | | | | | | EK |
| 1713.8728 | 1713.8539 | −0.0189 | −11 | 3102 | 3116 | HMLEEEGTLDL |
| | | | | | | LGLK |
| 1727.9149 | 1727.8947 | −0.0202 | −12 | 2151 | 2165 | KLLPQAEMFEH |
| | | | | | | LSGK |
| 1794.9636 | 1794.8103 | −0.1533 | −85 | 4976 | 4991 | QEFIDGILASKF |
| | | | | | | PTTK |
| 1838.8412 | 1838.927 | 0.0858 | 47 | 4830 | 4844 | ALIAEHQTFME |
| | | | | | | EMTR |
| 2186.155 | 2185.9851 | −0.1699 | −78 | 1958 | 1978 | LLSDTVASDPG |
| | | | | | | VLQEQLA |
| | | | | | | TTK |
| 2202.1799 | 2201.9719 | −0.208 | −94 | 2843 | 2861 | MSELRVTLDPV |
| | | | | | | QLESSLLR |
| 2233.1135 | 2233.0076 | −0.1059 | −47 | 2441 | 2460 | EALAGLLVTYP |
| | | | | | | NSQEAEN |
| | | | | | | WK |
| 2233.1135 | 2233.2017 | 0.0882 | 39 | 2441 | 2460 | EALAGLLVTYP |
| | | | | | | NSQEAEN |
| | | | | | | WK |
| 2299.0217 | 2299.144 | 0.1223 | 53 | 3047 | 3067 | EMFSQLADLDD |
| | | | | | | ELDGMG |
| | | | | | | AIGR |

| | |
|---|---|
| IPI01018940 | Tax_Id = 9606 Gene_Symbol = MACF1 Isoform 3 of |
| | Microtubule-actin cross-linking factor 1, |
| | isoforms 1/2/3/5 |

[0597] Peptide Information

| | | | | Start | End | |
|---|---|---|---|---|---|---|
| Calc. Mass | Obsrv. Mass | ±da | ±ppm | Seq. | Seq. | Sequence |
| 870.5229 | 870.5385 | 0.0156 | 18 | 3680 | 3687 | LMALGPIR |
| 870.5229 | 870.5385 | 0.0156 | 18 | 3680 | 3687 | LMALGPIR |
| 879.4935 | 879.4153 | −0.0782 | −89 | 1839 | 1846 | FVTISGQK |
| 880.441 | 880.4396 | −0.0014 | −2 | 2205 | 2211 | DFTELQK |
| 910.4265 | 910.4448 | 0.0183 | 20 | 3420 | 3426 | YSEIQDR |
| 910.4265 | 910.4448 | 0.0183 | 20 | 3420 | 3426 | YSEIQDR |
| 928.4669 | 928.4629 | −0.004 | −4 | 3596 | 3602 | KEVMEHR |
| 1021.5499 | 1021.5333 | −0.0166 | −16 | 2495 | 2502 | QQVQFMLK |
| 1021.5499 | 1021.5333 | −0.0166 | −16 | 2495 | 2502 | QQVQFM |
| | | | | | | LK |
| 1106.5034 | 1106.5583 | 0.0549 | 50 | 983 | 991 | LEEEVE |
| | | | | | | ACK |
| 1170.6841 | 1170.6443 | −0.0398 | −34 | 3256 | 3265 | VVKAQI |
| | | | | | | QEQK |
| 1187.6201 | 1187.6656 | 0.0455 | 38 | 2701 | 2710 | NCPISAK |
| | | | | | | LER |
| 1187.6201 | 1187.6656 | 0.0455 | 38 | 2701 | 2710 | NCPISAKLER |
| 1199.6896 | 1199.6674 | −0.0222 | −19 | 3702 | 3711 | AFSIDIIRHK |
| 1257.6797 | 1257.6525 | −0.0272 | −22 | 1471 | 1481 | QISEQLNALNK |
| 1257.6797 | 1257.6525 | −0.0272 | −22 | 1471 | 1481 | QISEQLNALNK |
| 1261.694 | 1261.6499 | −0.0441 | −35 | 345 | 354 | LLEVWIEFGR |
| 1287.6791 | 1287.6593 | −0.0198 | −15 | 4606 | 4616 | EKTLLPEDSQK |
| 1320.7271 | 1320.6016 | −0.1255 | −95 | 1835 | 1846 | GDLRFVTISGQK |
| 1406.7386 | 1406.6833 | −0.0553 | −39 | 4591 | 4602 | QPVYDTTIRTGR |
| 1406.7386 | 1406.6833 | −0.0553 | −39 | 4591 | 4602 | QPVYDTTIRTGR |
| 1413.7809 | 1413.8057 | 0.0248 | 18 | 3100 | 3111 | ARQEQLELTLGR |
| 1420.7213 | 1420.6881 | −0.0332 | −23 | 2884 | 2895 | TGSLEEMTQRLR |
| 1425.7156 | 1425.8075 | 0.0919 | 64 | 834 | 845 | NTISVKAVCDYR |
| 1428.7693 | 1428.7153 | −0.054 | −38 | 4996 | 5007 | LNDALDRLEELK |
| 1465.7281 | 1465.7726 | 0.0445 | 30 | 4372 | 4383 | EETYNQLLDKGR |
| 1465.7316 | 1465.7726 | 0.041 | 28 | 4384 | 4397 | LMLLSRDDSGSGSK |
| 1487.7952 | 1487.7654 | −0.0298 | −20 | 3509 | 3521 | QTTGEEVLLIQ |
| | | | | | | EK |
| 1502.873 | 1502.8582 | −0.0148 | −10 | 345 | 356 | LLEVWIEFGRIK |
| 1532.6785 | 1532.7728 | 0.0943 | 62 | 3835 | 3847 | ELNPEEGEMVE |
| | | | | | | EK |
| 1713.8728 | 1713.8539 | −0.0189 | −11 | 3067 | 3081 | HMLEEEGTLDL |
| | | | | | | LGLK |
| 1727.9149 | 1727.8947 | −0.0202 | −12 | 2116 | 2130 | KLLPQAEMFEH |
| | | | | | | LSGK |
| 1794.9636 | 1794.8103 | −0.1533 | −85 | 5050 | 5065 | QEFIDGILASKF |
| | | | | | | PTTK |
| 1838.8412 | 1838.927 | 0.0858 | 47 | 4904 | 4918 | ALIAEHQTFME |
| | | | | | | EMTR |
| 2186.155 | 2185.9851 | −0.1699 | −78 | 1923 | 1943 | LLSDTVASDPG |
| | | | | | | VLQEQLA |
| | | | | | | TTK |
| 2202.1799 | 2201.9719 | −0.208 | −94 | 2808 | 2826 | MSELRVTLDPV |
| | | | | | | QLESSLLR |
| 2233.1135 | 2233.0076 | −0.1059 | −47 | 2406 | 2425 | EALAGLLVTYP |
| | | | | | | NSQEAEN |
| | | | | | | WK |
| 2233.1135 | 2233.2017 | 0.0882 | 39 | 2406 | 2425 | EALAGLLVTYP |
| | | | | | | NSQEAEN |
| | | | | | | WK |
| 2299.0217 | 2299.144 | 0.1223 | 53 | 3012 | 3032 | EMFSQLADLDD |
| | | | | | | ELDGMG |
| | | | | | | AIGR |

| | |
|---|---|
| IPI00152653 | Tax_Id = 9606 |
| | Gene_Symbol = DNAH5 Dynein heavy |
| | chain 5, axonemal |

[0598] Peptide Information

| | | | | Start | End | |
|---|---|---|---|---|---|---|
| Calc. Mass | Obsrv. Mass | ±da | ±ppm | Seq. | Seq. | Sequence |
| 856.525 | 856.5223 | −0.0027 | −3 | 1408 | 1414 | QLNLLQK |
| 879.4683 | 879.4153 | −0.053 | −60 | 1654 | 1660 | RFSNIDK |
| 880.4774 | 880.4396 | −0.0378 | −43 | 1204 | 1211 | FALTAETK |
| 896.4407 | 896.4399 | −0.0008 | −1 | 747 | 753 | RNFSNMK |
| 910.488 | 910.4448 | −0.0432 | −47 | 1702 | 1709 | SLTGYLEK |
| 910.488 | 910.4448 | −0.0432 | −47 | 1702 | 1709 | SLTGYLEK |
| 912.4573 | 912.4597 | 0.0024 | 3 | 285 | 291 | AELEHWK |
| 928.5403 | 928.4629 | −0.0774 | −83 | 4440 | 4446 | IPAWWKK |
| 985.5941 | 985.582 | −0.0121 | −12 | 2503 | 2509 | RLELWLR |
| 985.5941 | 985.582 | −0.0121 | −12 | 2503 | 2509 | RLELWLR |
| 1005.5363 | 1005.6074 | 0.0711 | 71 | 820 | 827 | VNDLIEFR |
| 1021.4805 | 1021.5333 | 0.0528 | 52 | 2103 | 2111 | SVAMMVPDR |
| 1021.4805 | 1021.5333 | 0.0528 | 52 | 2103 | 2111 | SVAMMVPDR |
| 1106.5411 | 1106.5583 | 0.0172 | 16 | 326 | 333 | TWREMDIR |
| 1187.6816 | 1187.6656 | −0.016 | −13 | 4549 | 4558 | NMKLIESKPK |
| 1187.6816 | 1187.6656 | −0.016 | −13 | 4549 | 4558 | NMKLIESKPK |
| 1199.6995 | 1199.6674 | −0.0321 | −27 | 2585 | 2596 | AVLLIGEQGTAK |
| 1257.7566 | 1257.6525 | −0.1041 | −83 | 167 | 177 | LLSDIFIPALR |
| 1257.7566 | 1257.6525 | −0.1041 | −83 | 167 | 177 | LLSDIFIPALR |
| 1261.6212 | 1261.6499 | 0.0287 | 23 | 1299 | 1308 | VDTLHYAWEK |
| 1271.6553 | 1271.6659 | 0.0106 | 8 | 3711 | 3721 | TSIIDFTVTMK |
| 1332.7369 | 1332.6146 | −0.1223 | −92 | 3210 | 3222 | LKEASESVAAL |
| | | | | | | SK |
| 1413.8577 | 1413.8057 | −0.052 | −37 | 166 | 177 | RLLSDIFIPALR |
| 1428.7482 | 1428.7153 | −0.0329 | −23 | 3698 | 3710 | LPNPAYTPEISAR |
| 1502.9153 | 1502.8582 | −0.0571 | −38 | 1119 | 1132 | LVSVLSTIINSTKK |
| 1794.7972 | 1794.8103 | 0.0131 | 7 | 748 | 761 | NFSNMKMMLA |
| | | | | | | EYQR |
| 1838.8668 | 1838.927 | 0.0602 | 33 | 3501 | 3515 | ERWTEQSQEF |
| | | | | | | AAQTK |
| 2266.176 | 2266.0767 | −0.0993 | −44 | 957 | 975 | ELLSHFNHQNM |
| | | | | | | DALLKVT R |

| | |
|---|---|
| IPI00966721 | Tax_Id = 9606 Gene_Symbol = |
| | C5orf28 Uncharacterized protein |

[0599] Peptide Information

| Calc. | | | | Start | End | |
|---|---|---|---|---|---|---|
| Mass | Obsrv. Mass | ±da | ±ppm | Seq. | Seq. | Sequence |
| 870.5043 | 870.5385 | 0.0342 | 39 | 2 | 9 | EAALTLPR |
| 870.5043 | 870.5385 | 0.0342 | 39 | 2 | 9 | EAALTLPR |

| | |
|---|---|
| IPI00853050 | Tax_Id = 9606 |
| | Gene_Symbol = MB21D1 |
| | Uncharacterized protein |

[0600] Peptide Information

| Calc. Mass | Obsrv. Mass | ±da | ±ppm | Start Seq. | End Seq. | Sequence |
|---|---|---|---|---|---|---|
| 924.4897 | 924.4626 | −0.0271 | −29 | 385 | 392 | EILNNHGK |
| 985.5425 | 985.582 | 0.0395 | 40 | 157 | 166 | DAAPGASKLR |
| 985.5425 | 985.582 | 0.0395 | 40 | 157 | 166 | DAAPGASKLR |
| 1021.6153 | 1021.5333 | −0.082 | −80 | 188 | 196 | GVVDHLLLR |
| 1021.6153 | 1021.5333 | −0.082 | −80 | 188 | 196 | GVVDHLLLR |
| 1254.6161 | 1254.6615 | 0.0454 | 36 | 2 | 11 | QPWHGKAM |
| | | | | | | QR |
| 1257.5422 | 1257.6525 | 0.1103 | 88 | 496 | 505 | NNEFPVFDEF |
| 1257.5422 | 1257.6525 | 0.1103 | 88 | 496 | 505 | NNEFPVFDEF |
| 1271.7206 | 1271.6659 | −0.0547 | −43 | 303 | 315 | GGSPAVTLL |
| | | | | | | ISEK |
| 1287.6652 | 1287.6593 | −0.0059 | −5 | 12 | 25 | ASEAGATAP |
| | | | | | | KASAR |
| 1413.6719 | 1413.8057 | 0.1338 | 95 | 220 | 231 | ISAPNEFDV |
| | | | | | | MFK |
| 1479.7472 | 1479.7794 | 0.0322 | 22 | 174 | 187 | LSRDDISTA |
| | | | | | | AGMVK |

| | |
|---|---|
| IPI00854821 | Tax_Id = 9606 Gene_Symbol = DLG5 Isoform 4 of Disks |
| | large homolog 5 |

[0601] Peptide Information

| | | | | Start | End | |
|---|---|---|---|---|---|---|
| Calc. Mass | Obsrv. Mass | ±da | ±ppm | Seq. | Seq. | Sequence |
| 879.3876 | 879.4153 | 0.0277 | 31 | 132 | 138 | DDVDMLR |
| 880.4523 | 880.4396 | −0.0127 | −14 | 206 | 212 | DYDALRK |
| 924.4421 | 924.4626 | 0.0205 | 22 | 1766 | 1772 | LEQEYSR |
| 985.5537 | 985.582 | 0.0283 | 29 | 139 | 146 | RENGQLLR |
| 985.5537 | 985.582 | 0.0283 | 29 | 139 | 146 | RENGQLLR |
| 1187.5917 | 1187.6656 | 0.0739 | 62 | 712 | 722 | AHGPEVQAHNK |
| 1187.5917 | 1187.6656 | 0.0739 | 62 | 712 | 722 | AHGPEVQAHNK |
| 1261.6205 | 1261.6499 | 0.0294 | 23 | 358 | 368 | KAANEEMEALR |
| 1406.7526 | 1406.6833 | −0.0693 | −49 | 1495 | 1506 | LADVEQELSFKK |
| 1406.7526 | 1406.6833 | −0.0693 | −49 | 1495 | 1506 | LADVEQELSFKK |
| 1420.7026 | 1420.6881 | −0.0145 | −10 | 1562 | 1575 | DDNSATKTLSA |
| | | | | | | AAR |
| 1487.8315 | 1487.7654 | −0.0661 | −44 | 339 | 351 | LQTEVELAESKLK |
| 1502.7632 | 1502.8582 | 0.095 | 63 | 359 | 371 | AANEEMEALRQIK |
| 1727.9539 | 1727.8947 | −0.0592 | −34 | 1243 | 1259 | VQKGSEPLGISI |
| | | | | | | VSGEK |

| | |
|---|---|
| IPI00927275 | Tax_Id = 9606 Gene_Symbol = LMCD1 Uncharacterized |
| | protein |

[0602] Peptide Information

| Calc. Mass | Obsrv. Mass | ±da | ±ppm | Start Seq. | End Seq. | Sequence |
|---|---|---|---|---|---|---|
| 870.5043 | 870.5385 | 0.0342 | 39 | 7 | 14 | DLNPGVKK |
| 870.5043 | 870.5385 | 0.0342 | 39 | 7 | 14 | DLNPGVKK |
| 1106.5623 | 1106.5583 | −0.004 | −4 | 15 | 24 | MSLGQLQSAR |
| 1420.6063 | 1420.6881 | 0.0818 | 58 | 33 | 44 | GTCSGFEPHSWR |
| 2265.9951 | 2266.0767 | 0.0816 | 36 | 25 | 44 | GVACLGCKGTC |
| | | | | | | SGFEPH |

### 5—Fraction IV

[0603] 3 new found proteins in fraction IV which are named KH21 (SEQ ID NO. KH21), KH22 (SEQ ID NO. KH22) and KH23 (SEQ ID NO. 23) and their functions are being investigated. Following is their sequence.

| | |
|---|---|
| 11/A11 | Instr./Gel Origin |
| [1] Sample Project | Instrument |
| 20110325 | Sample |
| | Name |

| | |
|---|---|
| Protein Name | Accession No. |
| Tax_Id = 9606 Gene_Symbol = | IPI00966826 |
| PDS5A Protein | |
| KH21 (SEQ ID NO. KH21) Peptide | |
| Information | |

| Calc. Mass | Obsrv. Mass | ±da | ±ppm | Start Seq. | End Seq. | Sequence |
|---|---|---|---|---|---|---|
| 837.3705 | 837.4229 | .0524 | 63 | 146 | 151 | CQNMLR |
| | 837.4229 | | | | | |
| 842.4479 | 842.4476 | −.0003 | 0 | 16 | 22 | NPNKDVR |
| 875.4985 | 875.4897 | −.0088 | −10 | 81 | 87 | VSWIKDK |
| 1193.6525 | 1193.5586 | −.0939 | −79 | 156 | 165 | ELLDLHKQPT |
| 1254.6221 | 1254.6885 | .0664 | 53 | 55 | 65 | EAMMGLAQLYK |
| 1254.6221 | 1254.6885 | .0664 | 53 | 55 | 65 | EAMMGLAQLYK |
| 1732.8905 | 1732.8311 | −.0594 | −34 | 35 | 49 | IYAPEAPYTSH |
| | | | | | | DKLK |
| 1732.8905 | 1732.8311 | −.0594 | −34 | 35 | 49 | IYAPEAPYTSH |
| | | | | | | DKLK |

| | |
|---|---|
| Tax_Id = 9606 Gene_Symbol = - Hypothetical short | IPI00796008 |
| protein | |

[0604] Peptide Information

| Calc. Mass | Obsrv. Mass | ±da | ±ppm | Start Seq. | End Seq. | Sequence |
|---|---|---|---|---|---|---|
| 831.4067 | 831.4734 | .0667 | 80 | 12 | 19 | KGENGNGR |
| 919.4995 | 919.4981 | −.0014 | −2 | 5 | 11 | NYPLEKR |
| 919.4995 | 919.4981 | −.0014 | −2 | 5 | 11 | NYPLEKR |
| 1208.6093 | 1208.5834 | −.0259 | −21 | 1 | 10 | MASRNYPLEK |
| 1208.6093 | 1208.5834 | −.0259 | −21 | 1 | 10 | MASRNYPLEK |
| 1529.858 | 1529.8091 | −.0489 | −32 | 20 | 32 | MQLLSLRQLGA |
| | | | | | | QR |

| | |
|---|---|
| Tax_Id = 9606 Gene_Symbol = PACRGL Uncharacterized | IPI00964510 |
| protein | |

[0605] Peptide Information

| Calc. Mass | Obsrv. Mass | ±da | ±ppm | Start Seq. | End Seq. | Sequence |
|---|---|---|---|---|---|---|
| 851.4469 | 851.448 | .0011 | 1 | 24 | 31 | TSSSTQLK |
| 963.4741 | 963.5344 | .0603 | 63 | 4 | 13 | SEGSGGTQLK |
| 1208.5753 | 1208.5834 | .0081 | 7 | 41 | 52 | SSLSTSSPESAR |
| 1208.5753 | 1208.5834 | .0081 | 7 | 41 | 52 | SSLSTSSP |
| 1388.6007 | 1388.6624 | .0617 | 44 | 77 | 87 | SKIPTYCSI |

| | |
|---|---|
| Tax_Id = 9606 Gene_Symbol = DUS3L Isoform 3 of | IPI00186125 |
| tRNA-dihydrouridine synthase 3-like | |

[0606] Peptide Information

| Calc. Mass | Obsrv. Mass | ±da | ±ppm | Start Seq. | End Seq. | Sequence |
|---|---|---|---|---|---|---|
| 824.4261 | 824.4028 | −.0233 | −28 | 228 | 233 | EQRYTK |
| 831.4471 | 831.4734 | .0263 | 32 | 402 | 408 | HKANAYK |
| 875.4468 | 875.4897 | .0429 | 49 | 56 | 62 | ETELDIR |
| 1292.6263 | 1292.6439 | .0176 | 14 | 53 | 62 | TCRETELDIR |
| 1364.7025 | 1364.6797 | −.0228 | −17 | 267 | 279 | AMQTGVTGIMI |
| | | | | | | AR |
| 1529.7091 | 1529.8091 | .1 | 65 | 293 | 304 | EQRHWDISSS |
| | | | | | | ER |
| 2317.0361 | 2316.875 | −.1611 | −70 | 1 | 25 | MAEGTAEAPL |
| | | | | | | ENGGGG D |
| | | | | | | SGAGALER |

| | |
|---|---|
| Tax_Id = 9606 Gene_Symbol = GRB10 | IPI00879698 |
| Uncharacterized protein | |

[0607] Peptide Information

| Calc. Mass | Obsrv. Mass | ±da | ±ppm | Start Seq. | End Seq. | Sequence |
|---|---|---|---|---|---|---|
| 963.5622 | 963.5344 | −.0278 | −29 | 106 | 114 | SQPVHILAV |
| 972.5109 | 972.439 | −.0719 | −74 | 12 | 19 | DKVEQTPR |
| 990.5189 | 990.4394 | −.0795 | −80 | 1 | 9 | MQAAGPLFR |
| 1221.6409 | 1221.6112 | −.0297 | −24 | 1 | 11 | MQAAGPLFRSK |

| | |
|---|---|
| Tax_Id = 9606 Gene_Symbol = POLR1B 10 kDa protein | IPI00916605 |

[0608] Peptide Information

| Calc. Mass | Obsrv. Mass | ±da | ±ppm | Start Seq. | End Seq. | Sequence |
|---|---|---|---|---|---|---|
| 807.3777 | 807.3706 | −.0071 | −9 | 72 | 78 | GQCLSSR |
| 824.4485 | 824.4028 | −.0457 | −55 | 66 | 71 | RDHLQR |
| 1004.473 | 1004.4658 | −.0072 | −7 | 1 | 8 | MDPGSRWR |
| 1254.6953 | 1254.6885 | −.0068 | −5 | 7 | 17 | WRNLPSGPSLK |
| 1254.6953 | 1254.6885 | −.0068 | −5 | 7 | 17 | WRNLPSGPSLK |

| | |
|---|---|
| Tax_Id = 9606 Gene_Symbol = LCP1 Conserved | IPI00921552 |
| hypothetical protein | |

[0609] Peptide Information

| Calc. Mass | Obsrv. Mass | ±da | ±ppm | Start Seq. | End Seq. | Sequence |
|---|---|---|---|---|---|---|
| 919.5359 | 919.4981 | −.0378 | −41 | 30 | 37 | ALEGRVFK |
| 919.5359 | 919.4981 | −.0378 | −41 | 30 | 37 | ALEGRVFK |
| 963.5145 | 963.5344 | .0199 | 21 | 51 | 59 | AEGFLVAEK |
| 1392.7305 | 1392.6851 | −.0454 | −33 | 61 | 72 | QNLMTFG |
| | | | | | | TPVLR |
| 1529.8607 | 1529.8091 | −.0516 | −34 | 38 | 50 | MLDLVQA |
| | | | | | | QILELK |

| | |
|---|---|
| Tax_Id = 9606 | IPI00794678 |
| Gene_Symbol = LOC441528; HLA-A; LOC729162 | |
| MHC | |
| class I antigen | |

[0610] Peptide Information

| Calc. | Obsrv. | | | Start | End | |
|---|---|---|---|---|---|---|
| Mass | Mass | ±da | ±ppm | Seq. | Seq. | Sequence |
| 805.3798 | 805.3078 | −.072 | −89 | 93 | 99 | AQSQTDR |
| 807.3851 | 807.3706 | −.0145 | −18 | 1 | 7 | MAVMAPR |
| 963.4741 | 963.5344 | .0603 | 63 | 311 | 319 | ESRSLS |
| | | | | | | GDL |
| 1146.5862 | 1146.4808 | −.1054 | −92 | 90 | 99 | NVKAQS |
| | | | | | | QTDR |
| 1146.5862 | 1146.4808 | −.1054 | −92 | 90 | 99 | NVKAQS |
| | | | | | | QTDR |
| 1221.611 | 1221.6112 | .0002 | 0 | 146 | 155 | DYIALN |
| | | | | | | EDLR |
| 1392.6537 | 1392.6851 | .0314 | 23 | 301 | 313 | EGDGGV |
| | | | | | | MSLRESR |

| | |
|---|---|
| Tax_Id = 9606 Gene_Symbol = - | IPI00925836 |
| 37 kDa protein | |

[0611] Peptide Information

| Calc. | Obsrv. | | | Start | End | |
|---|---|---|---|---|---|---|
| Mass | Mass | ±da | ±ppm | Seq. | Seq. | Sequence |
| 805.3807 | 805.3078 | −.0729 | −91 | 39 | 45 | RPCGMGK |
| 1221.6344 | 1221.6112 | −.0232 | −19 | 39 | 48 | RPCGMG |
| | | | | | | KFLR |
| 1404.6941 | 1404.6514 | −.0427 | −30 | 73 | 84 | SCVWDG |
| | | | | | | NTPLKK |
| 1732.8785 | 1732.8311 | −.0474 | −27 | 114 | 129 | SVGPETA |
| | | | | | | ENESKLL |
| | | | | | | MK |
| 1732.8785 | 1732.8311 | −.0474 | −27 | 114 | 129 | SVGPETA |
| | | | | | | ENESKLL |
| | | | | | | MK |
| 2130.9299 | 2130.75 | −.1799 | −84 | 51 | 68 | LEMHGLW |
| | | | | | | EGSQEGDG |
| | | | | | | WQR |
| 2317.0847 | 2316.875 | −.2097 | −91 | 249 | 268 | ADMSPCP |
| | | | | | | HLPLITP |
| | | | | | | GIC MFK |

| | |
|---|---|
| Tax_Id = 9606 Gene_Symbol = GTF3C5 | IPI00642443 |
| General transcription factor IIIC, | |
| polypeptide 5, 63 kDa | |

[0612] Peptide Information

| Calc. | Obsrv. | | | Start | End | |
|---|---|---|---|---|---|---|
| Mass | Mass | ±da | ±ppm | Seq. | Seq. | Sequence |
| 807.4247 | 807.3706 | −.0541 | −67 | 14 | 20 | IYADPTK |
| 963.5258 | 963.5344 | .0086 | 9 | 14 | 21 | IYADPTKR |
| 1221.6951 | 1221.6112 | −.0839 | −69 | 235 | 245 | ANISVH |
| | | | | | | PDKLK |
| 1292.7686 | 1292.6439 | −.1247 | −96 | 41 | 51 | FSTSSL |
| | | | | | | LLRIR |
| 1388.5835 | 1388.6624 | .0789 | 57 | 30 | 40 | DPYCHPVC |
| | | | | | | ANR |
| 1392.7594 | 1392.6851 | −.0743 | −53 | 231 | 243 | NAVKANIS |
| | | | | | | VHPDK |

| | |
|---|---|
| Tax_Id = 9606 Gene_Symbol = | IPI00964988 |
| PPA2 Protein | |

[0613] Peptide Information

| Calc. | Obsrv. | | | Start | End | |
|---|---|---|---|---|---|---|
| Mass | Mass | ±da | ±ppm | Seq. | Seq. | Sequence |
| 828.4283 | 828.4123 | −.016 | −19 | 91 | 97 | EPMNPIK |
| 837.4465 | 837.4229 | −.0236 | −28 | 98 | 104 | QYVKDGK |
| 919.5247 | 919.4981 | −.0266 | −29 | 219 | 226 | LYKVPDGK |
| 919.5247 | 919.4981 | −.0266 | −29 | 219 | 226 | LYKVPDGK |
| 988.4734 | 988.4319 | −.0415 | −42 | 196 | 203 | FHDIDDVK |
| 1254.6875 | 1254.6885 | .001 | 1 | 156 | 166 | ILSCGEV |
| | | | | | | IHVK |
| 1254.6875 | 1254.6885 | .001 | 1 | 156 | 166 | ILSCGEV |
| | | | | | | IHVK |
| 1392.6688 | 1392.6851 | .0163 | 12 | 27 | 37 | RAMALY |
| | | | | | | HTEER |

| | |
|---|---|
| Tax_Id = 9606 Gene_Symbol = PACRGL | IPI00909252 |
| PACRG-like protein isoform 2 | |

[0614] Peptide Information

| Calc. | Obsrv. | | | Start | End | |
|---|---|---|---|---|---|---|
| Mass | Mass | ±da | ±ppm | Seq. | Seq. | Sequence |
| 851.4469 | 851.448 | .0011 | 1 | 24 | 31 | TSSSTQLK |
| 963.4741 | 963.5344 | .0603 | 63 | 4 | 13 | SEGSGG |
| | | | | | | TQLK |
| 1208.5753 | 1208.5834 | .0081 | 7 | 41 | 52 | SSLSTSS |
| | | | | | | PESAR |
| 1208.5753 | 1208.5834 | .0081 | 7 | 41 | 52 | SSLSTSSP |
| | | | | | | ESAR |
| 1388.6007 | 1388.6624 | .0617 | 44 | 113 | 123 | SKIPTY |
| | | | | | | CSICC |

| | |
|---|---|
| Tax_Id = 9606 | IPI00892717 |
| Gene_Symbol = RASGRP3 | |
| Uncharacterized protein | |

[0615] Peptide Information

| Calc. | Obsrv. | | | Start | End | |
|---|---|---|---|---|---|---|
| Mass | Mass | ±da | ±ppm | Seq. | Seq. | Sequence |
| 828.3556 | 828.4123 | .0567 | 68 | 98 | 103 | MTEEFR |
| 855.4215 | 855.3708 | −.0507 | −59 | 55 | 60 | LLCMYR |
| 1146.5798 | 1146.4808 | −.099 | −86 | 72 | 79 | LKICYFMR |
| 1146.5798 | 1146.4808 | −.099 | −86 | 72 | 79 | LKICYFMR |
| 1326.6576 | 1326.7201 | .0625 | 47 | 44 | 54 | WYLSS |
| | | | | | | TELAEK |

| | |
|---|---|
| Tax_Id = 9606 | IPI0089439 |
| Gene_Symbol = RASGRP3 | |
| Uncharacterized protein | |

[0616] Peptide Information

| Calc. | Obsrv. | | | Start | End | |
|---|---|---|---|---|---|---|
| Mass | Mass | ±da | ±ppm | Seq. | Seq. | Sequence |
| 828.3556 | 828.4123 | .0567 | 68 | 98 | 103 | MTEEFR |
| 855.4215 | 855.3708 | −.0507 | −59 | 55 | 60 | LLCMYR |
| 1146.5798 | 1146.4808 | −.099 | −86 | 72 | 79 | LKICYFMR |
| 1146.5798 | 1146.4808 | −.099 | −86 | 72 | 79 | LKICYFMR |
| 1326.6576 | 1326.7201 | .0625 | 47 | 44 | 54 | WYLSSTE |
| | | | | | | LAEK |

| | |
|---|---|
| Tax_Id = 9606 Gene_Symbol = KPNA1 | IPI00789357 |
| 7 kDa protein | |

[0617] Peptide Information

| Calc. | Obsrv. | | | Start | End | |
|---|---|---|---|---|---|---|
| Mass | Mass | ±da | ±ppm | Seq. | Seq. | Sequence |
| 1217.5112 | 1217.4189 | −.0923 | −76 | 13 | 21 | LCQMEA |
| | | | | | | FMR |
| 1313.6163 | 1313.4952 | −.1211 | −92 | 12 | 21 | KLCQME |
| | | | | | | AFMR |
| 1313.6163 | 1313.4952 | −.1211 | −92 | 12 | 21 | KLCQME |
| | | | | | | AFMR |

| | |
|---|---|
| Tax_Id = 9606 Gene_Symbol = MYCL1 | IPI00643210 |
| protein L-Myc-1 isoform 2 | |

[0618] Peptide Information

| Calc. | Obsrv. | | | Start | End | |
|---|---|---|---|---|---|---|
| Mass | Mass | ±da | ±ppm | Seq. | Seq. | Sequence |
| 875.4523 | 875.4897 | .0374 | 43 | 206 | 213 | GPPHGWPK |
| 1292.6859 | 1292.6439 | −.042 | −32 | 111 | 121 | GWGRN |
| | | | | | | YASIIR |
| 1364.598 | 1364.6797 | .0817 | 60 | 2 | 13 | CVCAGCR |
| | | | | | | AAPSR |
| 1388.5835 | 1388.6624 | .0789 | 57 | 122 | 132 | RDCMWSG |
| | | | | | | FSAR |
| 1511.6334 | 1511.7499 | .1165 | 77 | 1 | 13 | MCVCAGC |
| | | | | | | RAAPSR |

| | |
|---|---|
| Tax_Id = 9606 Gene_Symbol = | IPI00792017 |
| SLFN12 Uncharacterized protein | |

[0619] Peptide Information

| Calc. | Obsrv. | | | Start | End | |
|---|---|---|---|---|---|---|
| Mass | Mass | ±da | ±ppm | Seq. | Seq. | Sequence |
| 819.3955 | 819.3359 | −.0596 | −73 | 40 | 46 | QNESVSR |
| 875.4581 | 875.4897 | .0316 | 36 | 21 | 28 | VTLGENSR |
| 1069.432 | 1069.3781 | −.0539 | −50 | 61 | 69 | AEIENE |
| | | | | | | DYS |
| 1406.7131 | 1406.6873 | −.0258 | −18 | 47 | 60 | AMCALLN |
| | | | | | | SGGGVIK |

| | |
|---|---|
| Tax_Id = 9606 Gene_Symbol = | IPI00064351 |
| C8orf76 Uncharacterized protein C8orf76 | |

[0620] Peptide Information

| Calc. | Obsrv. | | | Start | End | |
|---|---|---|---|---|---|---|
| Mass | Mass | ±da | ±ppm | Seq. | Seq. | Sequence |
| 824.4083 | 824.4028 | −.0055 | −7 | 264 | 270 | ACASFIR |
| 851.437 | 851.448 | .011 | 13 | 67 | 72 | RQEYQK |
| 990.4738 | 990.4394 | −.0344 | −35 | 293 | 300 | TQQEIEDK |
| 1193.5732 | 1193.5586 | −.0146 | −12 | 24 | 34 | RSGPPAS |
| | | | | | | YCAK |
| 1254.6212 | 1254.6885 | .0673 | 54 | 73 | 83 | ALQEYSS |
| | | | | | | ISEK |
| 1254.6212 | 1254.6885 | .0673 | 54 | 73 | 83 | ALQEYSSI |
| | | | | | | SEK |
| 1392.661 | 1392.6851 | .0241 | 17 | 241 | 252 | ALTNIQNC |
| | | | | | | MAEK |

| | |
|---|---|
| Tax_Id = 9606 Gene_Symbol = POR | IPI00852905 |
| Uncharacterized protein | |

[0621] Peptide Information

| Calc. | Obsrv. | | | Start | End | |
|---|---|---|---|---|---|---|
| Mass | Mass | ±da | ±ppm | Seq. | Seq. | Sequence |
| 832.3618 | 832.3014 | −.0604 | −73 | 35 | 41 | LPDGDCR |
| 870.5156 | 870.5143 | −.0013 | −1 | 2 | 9 | RLPGVNSK |
| 1404.7417 | 1404.6514 | −.0903 | −64 | 42 | 54 | GVCQPPV |
| | | | | | | QGRPPL |

| | |
|---|---|
| Tax_Id = 9606 Gene_Symbol = ACACB | IPI00848209 |
| ACACB protein | |

[0622] Peptide Information

| Calc. | Obsrv. | | | Start | End | |
|---|---|---|---|---|---|---|
| Mass | Mass | ±da | ±ppm | Seq. | Seq. | Sequence |
| 820.3988 | 820.343 | −.0558 | −68 | 839 | 844 | DVSWWK |
| 837.4828 | 837.4229 | −.0599 | −72 | 110 | 116 | TFVQSKK |
| 843.5046 | 843.4919 | −.0127 | −15 | 366 | 372 | DLLQAKR |
| 990.5255 | 990.4394 | −.0861 | −87 | 699 | 706 | EIEFLPSR |
| 1217.4991 | 1217.4189 | −.0802 | −66 | 70 | 79 | TSLYSE |
| | | | | | | DDCK |
| 1254.6113 | 1254.6885 | .0772 | 62 | 443 | 452 | FKTQEY |
| | | | | | | PEGR |
| 1254.6113 | 1254.6885 | .0772 | 62 | 443 | 452 | FKTQEY |
| | | | | | | PEGR |
| 1313.6121 | 1313.4952 | −.1169 | −89 | 147 | 156 | DEFAE |
| | | | | | | DRIYR |
| 1313.6121 | 1313.4952 | −.1169 | −89 | 147 | 156 | DEFAED |
| | | | | | | RIYR |
| 1406.7726 | 1406.6873 | −.0853 | −61 | 713 | 724 | WMLAGR |
| | | | | | | PHPTLK |
| 1529.6989 | 1529.8091 | .1102 | 72 | 825 | 838 | GFSGGM |
| | | | | | | KGCLGT |
| | | | | | | WR |

| | |
|---|---|
| 16/A16 | Instr./Gel Origin |
| [1] Sample Project | Instrument |
| 20110325 | Sample |
| | Name |

| | |
|---|---|
| Protein Name | Accession No. |
| Tax_Id = 9606 Gene_Symbol = | IPI00760788 |

KLHL22 Isoform 2 of Ketch-like protein 22
KH22 (SEQ ID. NO. KH22)

[0623] Peptide Information

| Calc. | Obsrv. | | | Start | End | |
|---|---|---|---|---|---|---|
| Mass | Mass | ±da | ±ppm | Seq. | Seq. | Sequence |
| 880.4523 | 880.4501 | −.0022 | −2 | 455 | 461 | RGEDYLK |
| 957.4649 | 957.4094 | −.0555 | −58 | 372 | 378 | YDPRHNR |
| 999.537 | 999.4399 | −.0971 | −97 | 330 | 338 | HFTASLA |
| | | | | | | PR |
| 1056.5078 | 1056.4048 | −.103 | −97 | 448 | 455 | MYITCGRR |
| 1184.606 | 1184.4923 | −.1137 | −96 | 178 | 187 | NFVAFS |
| | | | | | | RTDK |
| 1241.646 | 1241.576 | −.07 | −56 | 484 | 494 | AWHGMAT |
| | | | | | | LLNK |
| 1279.61 | 1279.5404 | −.0696 | −54 | 268 | 278 | DTVASAL |
| | | | | | | MYHR |
| 1328.6667 | 1328.6581 | −.0086 | −6 | 66 | 76 | ILLAASC |
| | | | | | | DYFR |

| | |
|---|---|
| Tax_Id = 9606 Gene_Symbol = - | IPI00746984 |
| Conserved hypothetical protein | |

[0624] Peptide Information

| Calc. | Obsrv. | | | Start | End | |
|---|---|---|---|---|---|---|
| Mass | Mass | ±da | ±ppm | Seq. | Seq. | Sequence |
| 999.4788 | 999.4399 | −.0389 | −39 | 40 | 48 | CQGAKH |
| | | | | | | NGK |
| 1083.4814 | 1083.5062 | .0248 | 23 | 45 | 56 | HNGKGGA |
| | | | | | | DAAEG |
| 2210.0586 | 2209.9976 | −.061 | −28 | 5 | 23 | SPDAHHP |
| | | | | | | GLFMFEP |
| | | | | | | ILE EK |

| | |
|---|---|
| Tax_Id = 9606 Gene_Symbol = SEC14L3 | IPI00894175 |
| 5 kDa protein | |

[0625] Peptide Information

| | Obsrv. | | | Start | End | |
|---|---|---|---|---|---|---|
| Calc. Mass | Mass | ±da | ±ppm | Seq. | Seq. | Sequence |
| 809.3821 | 809.3715 | −.0106 | −13 | 19 | 25 | MESLSSR |
| 1146.5936 | 1146.4998 | −.0938 | −82 | 1 | 11 | MSGRVGDLSPK |
| 1456.8007 | 1456.7645 | −.0362 | −25 | 5 | 18 | VGDLSPKQAET |
| | | | | | | LAK |
| 1456.8007 | 1456.7645 | −.0362 | −25 | 5 | 18 | VGDLSPKQAET |
| | | | | | | LAK |

| | |
|---|---|
| Tax_Id = 9606 Gene_Symbol = MAPKAPK5 6 kDa | IPI00797302 |
| protein | |

[0626] Peptide Information

| | Obsrv. | | | Start | End | |
|---|---|---|---|---|---|---|
| Calc. Mass | Mass | ±da | ±ppm | Seq. | Seq. | Sequence |
| 1142.4341 | 1142.326 | −.1081 | −95 | 2 | 11 | MEEEGGAMEK |
| 1241.4847 | 1241.576 | .0913 | 74 | 1 | 11 | MMEEEGGAMEK |
| 1456.6294 | 1456.7645 | .1351 | 93 | 2 | 14 | MEEEGGAMEK |
| | | | | | | VSK |
| 1456.6294 | 1456.7645 | .1351 | 93 | 2 | 14 | MEEEGGAMEK |
| | | | | | | VSK |

| | |
|---|---|
| Tax_Id = 9606 Gene_Symbol = KRT71 Keratin, | IPI00061200 |
| type II cytoskeletal 71 | |

[0627] Peptide Information

| | Obsrv. | | | Start | End | |
|---|---|---|---|---|---|---|
| Calc. Mass | Mass | ±da | ±ppm | Seq. | Seq. | Sequence |
| 800.3686 | 800.3445 | −.0241 | −30 | 66 | 73 | SGGYGFGR |
| 919.4843 | 919.5223 | .038 | 41 | 56 | 65 | SLNVASGSGK |
| 959.4905 | 959.4409 | −.0496 | −52 | 383 | 391 | GDNALKDAR |
| 961.4949 | 961.4734 | −.0215 | −22 | 346 | 353 | NEISELTR |
| 961.4949 | 961.4734 | −.0215 | −22 | 346 | 353 | NEISELTR |
| 997.4697 | 997.4683 | −.0014 | −1 | 497 | 505 | SRGSANDYK |
| 1018.5164 | 1018.4394 | −.077 | −76 | 191 | 199 | QLETLSGDR |
| 1018.5164 | 1018.4394 | −.077 | −76 | 191 | 199 | QLETLSGDR |
| 1146.6113 | 1146.4998 | −.1115 | −97 | 190 | 199 | KQLETLSGDR |
| 1873.0178 | 1872.8617 | −.1561 | −83 | 175 | 190 | NNLEPILEGY |

| | |
|---|---|
| Tax_Id = 9606 Gene_Symbol = SCHIP1 | IPI00947302 |
| Uncharacterized protein | |

[0628] Peptide Information

| | Obsrv. | | | Start | End | |
|---|---|---|---|---|---|---|
| Calc. Mass | Mass | ±da | ±ppm | Seq. | Seq. | Sequence |
| 980.4176 | 980.4788 | .0612 | 62 | 25 | 32 | VTPCSECK |
| 1241.6233 | 1241.576 | −.0473 | −38 | 90 | 101 | SPAREPGDVSAR |
| 1312.5612 | 1312.5774 | .0162 | 12 | 2 | 15 | DLGSDAGSSSS |
| | | | | | | SSR |
| 1312.5612 | 1312.5774 | .0162 | 12 | 2 | 15 | DLGSDAGSSSS |
| | | | | | | SSR |
| 1459.5966 | 1459.5133 | −.0833 | −57 | 1 | 15 | MDLGSDAGSS |
| | | | | | | SSSSR |

| | |
|---|---|
| Tax_Id = 9606 Gene_Symbol = KLHL22 Isoform 1 of | IPI00156791 |
| Ketch-like protein 22 | |

[0629] Peptide Information

| | Obsrv. | | | Start | End | |
|---|---|---|---|---|---|---|
| Calc. Mass | Mass | ±da | ±ppm | Seq. | Seq. | Sequence |
| 880.4523 | 880.4501 | −.0022 | −2 | 455 | 461 | RGEDYLK |
| 957.4649 | 957.4094 | −.0555 | −58 | 372 | 378 | YDPRHNR |
| 999.537 | 999.4399 | −.0971 | −97 | 330 | 338 | HFTASLAPR |
| 1056.5078 | 1056.4048 | −.103 | −97 | 448 | 455 | MYITCGRR |
| 1184.606 | 1184.4923 | −.1137 | −96 | 178 | 187 | NFVAFSRTDK |
| 1241.646 | 1241.576 | −.07 | −56 | 484 | 494 | AWHGMATLLNK |
| 1279.61 | 1279.5404 | −.0696 | −54 | 268 | 278 | DTVASALMYHR |
| 1328.6667 | 1328.6581 | −.0086 | −6 | 66 | 76 | ILLAASCDYFR |

| | |
|---|---|
| Tax_Id = 9606 Gene_Symbol = HTATSF1 HIV | IPI00013788 |
| Tat-specific factor 1 | |

[0630] Peptide Information

| | Obsrv. | | | Start | End | |
|---|---|---|---|---|---|---|
| Calc. Mass | Mass | ±da | ±ppm | Seq. | Seq. | Sequence |
| 831.457 | 831.4774 | .0204 | 25 | 655 | 662 | GLEAADKK |
| 935.3774 | 935.3341 | −.0433 | −46 | 466 | 473 | ESEEGCPK |
| 996.4269 | 996.3946 | −.0323 | −32 | 717 | 724 | LFDDSDER |
| 999.42 | 999.4399 | .0199 | 20 | 475 | 483 | GFEGSCSQK |
| 1056.4667 | 1056.4048 | −.0619 | −59 | 18 | 26 | MQELYGDGK |
| 1083.4478 | 1083.5062 | .0584 | 54 | 637 | 645 | VFDDESDEK |
| 1241.5765 | 1241.576 | −.0005 | 0 | 182 | 191 | GDGLCCYLKR |
| 1383.6764 | 1383.5829 | −.0935 | −68 | 399 | 410 | ARHFSEHPSTSK |
| 1783.7253 | 1783.7095 | −.0158 | −9 | 434 | 450 | TEDGGEFEEGA |
| | | | | | | SENNA K |

| | |
|---|---|
| Tax_Id = 9606 Gene_Symbol = DDX23 Probable | IPI00006725 |
| ATP-dependent RNA helicase DDX23 | |

[0631] Peptide Information

| | Obsrv. | | | Start | End | |
|---|---|---|---|---|---|---|
| Calc. Mass | Mass | ±da | ±ppm | Seq. | Seq. | Sequence |
| 831.457 | 831.4774 | .0204 | 25 | 2 | 9 | AGELADKK |
| 996.4819 | 996.3946 | −.0873 | −88 | 588 | 596 | MLANFESGK |
| 1012.4768 | 1012.4625 | −.0143 | −14 | 588 | 596 | MLANFESGK |
| 1018.455 | 1018.4394 | −.0156 | −15 | 319 | 326 | FYGDLMEK |
| 1018.4799 | 1018.4394 | −.0405 | −40 | 12 | 20 | DASPSKEER |
| 1146.6001 | 1146.4998 | −.1003 | −87 | 430 | 441 | DIIGVAETGSGK |
| 1198.5951 | 1198.4972 | −.0979 | −82 | 375 | 385 | EDYSITTKGGK |
| 1241.6195 | 1241.576 | −.0435 | −35 | 643 | 652 | VFLMSESEKR |
| 1456.8119 | 1456.7645 | −.0474 | −33 | 712 | 726 | AGAKDILVATD |
| | | | | | | VAGR |
| 1456.8119 | 1456.7645 | −.0474 | −33 | 712 | 726 | AGAKDILVATDVAGR |
| 1872.9702 | 1872.8617 | −.1085 | −58 | 462 | 478 | IEESDQGPYAII |
| | | | | | | LAPTR |

| | |
|---|---|
| Tax_Id = 9606 Gene_Symbol = VDAC3 6 kDa protein | IPI00973345 |

[0632] Peptide Information

| | Obsrv. | | | Start | End | |
|---|---|---|---|---|---|---|
| Calc. Mass | Mass | ±da | ±ppm | Seq. | Seq. | Sequence |
| 1328.561 | 1328.6581 | .0971 | 73 | 2 | 12 | CNTPTYCDLGK |
| 1459.6014 | 1459.5133 | −.0881 | −60 | 1 | 12 | MCNTPTYCDL |
| | | | | | | GK |
| 1745.7656 | 1745.757 | −.0086 | −5 | 1 | 15 | MCNTPTYCDL |
| | | | | | | GKAAK |

| | |
|---|---|
| Tax_Id = 9606 Gene_Symbol = SCHIP1 | IPI00946287 |
| Uncharacterized protein | |

[0633] Peptide Information

| | | | | Start | End | |
|---|---|---|---|---|---|---|
| Calc. Mass | Obsrv. Mass | ±da | ±ppm | Seq. | Seq. | Sequence |
| 980.4176 | 980.4788 | .0612 | 62 | 25 | 32 | VTPCSECK |
| 1241.6233 | 1241.576 | −.0473 | −38 | 90 | 101 | SPAREPGDVSAR |
| 1312.5612 | 1312.5774 | .0162 | 12 | 2 | 15 | DLGSDAGSSSS |
| | | | | | | SSR |
| 1312.5612 | 1312.5774 | .0162 | 12 | 2 | 15 | DLGSDAGSSSS |
| | | | | | | SSR |
| 1459.5966 | 1459.5133 | −.0833 | −57 | 1 | 15 | MDLGSDAGSS |
| | | | | | | SSSSR |

| | |
|---|---|
| Tax_Id = 9606 Gene_Symbol = TSEN2 tRNA-splicing | IPI00926682 |
| endonuclease subunit Sen2 isoform 3 | |

[0634] Peptide Information

| Calc. | Obsrv. | | | Start | End | |
|---|---|---|---|---|---|---|
| Mass | Mass | ±da | ±ppm | Seq. | Seq. | Sequence |
| 831.4617 | 831.4774 | .0157 | 19 | 223 | 228 | NRLICR |
| 919.4744 | 919.5223 | .0479 | 52 | 394 | 400 | WVSSRER |
| 1069.491 | 1069.3982 | −.0928 | −87 | 144 | 152 | NEEAQV |
| | | | | | | HDK |
| 1140.437 | 1140.3239 | −.1131 | −99 | 374 | 382 | EMESPE |
| | | | | | | CMK |
| 1140.437 | 1140.3239 | −.1131 | −99 | 374 | 382 | EMESPE |
| | | | | | | CMK |
| 1241.6888 | 1241.576 | −.1128 | −91 | 303 | 312 | YGTDLLL |
| | | | | | | YRK |
| 1279.6165 | 1279.5404 | −.0761 | −59 | 53 | 63 | NAEDIEQ |
| | | | | | | LYGK |
| 1312.5331 | 1312.5774 | .0443 | 34 | 374 | 383 | EMESPE |
| | | | | | | CMKR |
| 1312.5331 | 1312.5774 | .0443 | 34 | 374 | 383 | EMESPE |
| | | | | | | CMKR |
| 1328.528 | 1328.6581 | .1301 | 98 | 374 | 383 | EMESPE |
| | | | | | | CMKR |

| | |
|---|---|
| Tax_Id = 9606 Gene_Symbol = | IPI00657872 |
| IGF2AS 14 kDa protein | |

[0635] Peptide Information

| | Obsrv. | | | Start | End | |
|---|---|---|---|---|---|---|
| Calc. Mass | Mass | ±da | ±ppm | Seq. | Seq. | Sequence |
| 961.4632 | 961.4734 | .0102 | 11 | 73 | 81 | EAGGCVRGR |
| 961.481 | 961.4734 | −.0076 | −8 | 53 | 61 | AESRSGAQR |
| 1326.6696 | 1326.5909 | −.0787 | −59 | 41 | 52 | RAPAPAGQQQ |
| | | | | | | MR |

| | |
|---|---|
| Tax_Id = 9606 Gene_Symbol = STK19 | IPI00945765 |
| Uncharacterized protein | |

[0636] Peptide Information

| | Obsrv. | | | Start | End | |
|---|---|---|---|---|---|---|
| Calc. Mass | Mass | ±da | ±ppm | Seq. | Seq. | Sequence |
| 809.4152 | 809.3715 | −.0437 | −54 | 24 | 32 | GGGGVSFTK |
| 1184.5994 | 1184.4923 | −.1071 | −90 | 53 | 61 | ACPWREPIR |
| 1326.6649 | 1326.5909 | −.074 | −56 | 33 | 45 | EVDTNVATGAP |
| | | | | | | PR |
| 1328.6052 | 1328.6581 | .0529 | 40 | 83 | 93 | HCSAPEDPIFR |

| | |
|---|---|
| Tax_Id = 9606 Gene_Symbol = DDX23 cDNA FLJ46571 | IPI00903057 |
| fis, clone THYMU3041428, highly similar to | |
| Probable ATP-dependent RNA helicase DDX23 | |

[0637] Peptide Information

| | Obsrv. | | | Start | End | |
|---|---|---|---|---|---|---|
| Calc. Mass | Mass | ±da | ±ppm | Seq. | Seq. | Sequence |
| 831.457 | 831.4774 | .0204 | 25 | 2 | 9 | AGELADKK |
| 996.4819 | 996.3946 | −.0873 | −88 | 568 | 576 | MLANFESGK |
| 1012.4768 | 1012.4625 | −.0143 | −14 | 568 | 576 | MLANFESGK |
| 1018.455 | 1018.4394 | −.0156 | −15 | 299 | 306 | FYGDLMEK |
| 1018.4799 | 1018.4394 | −.0405 | −40 | 12 | 20 | DASPSKEER |
| 1146.6001 | 1146.4998 | −.1003 | −87 | 410 | 421 | DIIGVAETGS |
| | | | | | | GK |
| 1198.5951 | 1198.4972 | −.0979 | −82 | 355 | 365 | EDYSITTKGGK |
| 1241.6195 | 1241.576 | −.0435 | −35 | 623 | 632 | VFLMSESEKR |
| 1456.8119 | 1456.7645 | −.0474 | −33 | 692 | 706 | AGAKDILVAT |
| | | | | | | DVAGR |
| 1456.8119 | 1456.7645 | −.0474 | −33 | 692 | 706 | AGAKDILVAT |
| | | | | | | DVAGR |
| 1872.9702 | 1872.8617 | −.1085 | −58 | 442 | 458 | IEESDQGPYA |
| | | | | | | IILAPTR |

| | |
|---|---|
| Tax_Id = 9606 Gene_Symbol = SNX7 Isoform 1 of | IPI00942419 |
| Sorting nexin-7 | |

[0638] Peptide Information

| | | | | Start | End | |
|---|---|---|---|---|---|---|
| Calc. Mass | Obsrv. Mass | ±da | ±ppm | Seq. | Seq. | Sequence |
| 896.3964 | 896.4366 | .0402 | 45 | 252 | 258 | CCKATEK |
| 935.4251 | 935.3341 | −.091 | −97 | 244 | 251 | DVASCIDR |
| 961.3971 | 961.4734 | .0763 | 79 | 216 | 222 | EYFDEMK |
| 961.3971 | 961.4734 | .0763 | 79 | 216 | 222 | EYFDEMK |
| 1018.4985 | 1018.4394 | −.0591 | −58 | 323 | 331 | VECANNALK |
| 1018.4985 | 1018.4394 | −.0591 | −58 | 323 | 331 | VECANNALK |
| 1146.5637 | 1146.4998 | −.0639 | −56 | 289 | 298 | DQIQAELDSK |
| 1312.6281 | 1312.5774 | −.0507 | −39 | 109 | 118 | FNDDFIETRR |
| 1312.6281 | 1312.5774 | −.0507 | −39 | 109 | 118 | FNDDFIETRR |
| 1383.5814 | 1383.5829 | .0015 | 1 | 244 | 254 | DVASCIDRCCK |

| | |
|---|---|
| Tax_Id = 9606 Gene_Symbol = HSP90AB5P Heat shock | IPI00556622 |
| protein 90Be | |

[0639] Peptide Information

| | Obsrv. | | | Start | End | |
|---|---|---|---|---|---|---|
| Calc. Mass | Mass | ±da | ±ppm | Seq. | Seq. | Sequence |
| 847.3511 | 847.329 | −.0221 | −26 | 1 | 7 | MGYMMAK |
| 919.4367 | 919.5223 | .0856 | 93 | 26 | 33 | AEVDKDDK |
| 959.451 | 959.4409 | −.0101 | −11 | 1 | 8 | MGYMMAKK |

| | |
|---|---|
| Tax_Id = 9606 Gene_Symbol = | IPI00888272 |
| LOC100131519 similar to hCG1651476 | |

[0640] Peptide Information

| Calc. | Obsrv. | | | Start | End | |
|---|---|---|---|---|---|---|
| Mass | Mass | ±da | ±ppm | Seq. | Seq. | Sequence |
| 831.4431 | 831.4774 | .0343 | 41 | 37 | 43 | LDARNSR |
| 997.5214 | 997.4683 | −.0531 | −53 | 6 | 12 | YRDLQFR |
| 1083.4636 | 1083.5062 | .0426 | 39 | 13 | 21 | DRDCSG |
| | | | | | | AFR |
| 1421.6447 | 1421.5438 | −.1009 | −71 | 100 | 110 | CKCVPQ |
| | | | | | | MQQSR |

| | |
|---|---|
| Tax_Id = 9606 Gene_Symbol = ZNF483 | IPI00478644 |
| Zinc finger protein 483 | |

[0641] Peptide Information

| Calc. | Obsrv. | | | Start | End | |
|---|---|---|---|---|---|---|
| Mass | Mass | ±da | ±ppm | Seq. | Seq. | Sequence |
| 919.4367 | 919.5223 | .0856 | 93 | 145 | 153 | EEAGDI |
| | | | | | | ASK |
| 1037.4647 | 1037.4038 | −.0609 | −59 | 43 | 52 | GNAADA |
| | | | | | | ESFR |
| 1350.6383 | 1350.5377 | −.1006 | −74 | 145 | 157 | EEAGDIA |
| | | | | | | SKSESK |
| 1421.6332 | 1421.5438 | −.0894 | −63 | 168 | 178 | EESEVRS |
| | | | | | | WDWW |

| | |
|---|---|
| Tax_Id = 9606 Gene_Symbol = MTHFS | IPI00643098 |
| 8 kDa protein | |

[0642] Peptide Information

| Calc. | Obsrv. | | | Start | End | |
|---|---|---|---|---|---|---|
| Mass | Mass | ±da | ±ppm | Seq. | Seq. | Sequence |
| 809.4489 | 809.3715 | −.0774 | −96 | 9 | 15 | HGNRLGR |
| 880.4233 | 880.4501 | .0268 | 30 | 1 | 8 | MPGLGFDK |
| 1328.6528 | 1328.6581 | .0053 | 4 | 1 | 12 | MPGLGFDK |
| | | | | | | HGNR |

| | |
|---|---|
| 18/A18 | Instr./Gel Origin |
| [1] Sample Project | Instrument |
| 20110325 | Sample |
| | Name |

| | |
|---|---|
| Protein Name | Accession No. |
| Tax_Id = 9606 Gene_Symbol = | IPI00917278 |
| SETD2 120 kDa protein | |

[0643] KH23 (SEQ ID. NO. KH23) Peptide Information

| Calc. | Obsrv. | | | Start | End | |
|---|---|---|---|---|---|---|
| Mass | Mass | ±da | ±ppm | Seq. | Seq. | Sequence |
| 818.4042 | 818.405 | .0008 | 1 | 608 | 613 | HLYEEK |
| 818.4042 | 818.405 | .0008 | 1 | 608 | 613 | HLYEEK |
| 829.4315 | 829.4913 | .0598 | 72 | 953 | 958 | DPQRWK |
| 891.4418 | 891.4531 | .0113 | 13 | 18 | 25 | TSENEAIK |
| 980.5047 | 980.4961 | −.0086 | −9 | 885 | 892 | DFSKNLEK |
| 1018.5779 | 1018.5897 | .0118 | 12 | 148 | 156 | ELDSLS |
| | | | | | | KVK |
| 1018.5779 | 1018.5897 | .0118 | 12 | 148 | 156 | ELDSLS |
| | | | | | | KVK |
| 1047.5615 | 1047.557 | −.0045 | −4 | 94 | 102 | GSELR |
| | | | | | | MINK |
| 1091.646 | 1091.5599 | −.0861 | −79 | 853 | 861 | FLLSL |
| | | | | | | QKDK |
| 1102.6508 | 1102.5885 | −.0623 | −57 | 126 | 134 | KLDEL |
| | | | | | | PIFK |
| 1103.5844 | 1103.588 | .0036 | 3 | 414 | 423 | SSEFLKH |
| | | | | | | AGK |

| | |
|---|---|
| Tax_Id = 9606 Gene_Symbol = CCBL2 | IPI00553183 |
| kynurenine--oxoglutarate transaminase | |
| 3 isoform 2 | |

[0644] Peptide Information

| Calc. | Obsrv. | | | Start | End | |
|---|---|---|---|---|---|---|
| Mass | Mass | ±da | ±ppm | Seq. | Seq. | Sequence |
| 830.4341 | 830.4764 | .0423 | 51 | 366 | 371 | WMTKHK |
| 908.52 | 908.4479 | −.0721 | −79 | 2 | 9 | SLKFTNAK |
| 955.507 | 955.4167 | −.0903 | −95 | 363 | 369 | FVKWMTK |
| 986.5193 | 986.4275 | −.0918 | −93 | 75 | 82 | ALSYLYEK |
| 1040.5524 | 1040.5715 | .0191 | 18 | 388 | 395 | SQFEKFVR |
| 1042.4476 | 1042.4867 | .0391 | 38 | 355 | 362 | NNEPYDYK |
| 1055.5554 | 1055.5176 | −.0378 | −36 | 1 | 9 | MSLKFT |
| | | | | | | NAK |
| 1116.6023 | 1116.5959 | −.0064 | −6 | 393 | 400 | FVRFCF |
| | | | | | | IK |
| 1623.8047 | 1623.7913 | −.0134 | −8 | 373 | 387 | LSAIPVSA |
| | | | | | | FCNSETK |
| 1753.9484 | 1753.8547 | −.0937 | −53 | 238 | 254 | TITIGSAG |
| | | | | | | KTFSVTG |
| | | | | | | WK |
| 1753.9484 | 1753.8547 | −.0937 | −53 | 238 | 254 | TITIGSAG |
| | | | | | | KTFSVTG |
| | | | | | | WK |

| | |
|---|---|
| Tax_Id = 9606 Gene_Symbol = SPTBN5 | IPI00219168 |
| Spectrin beta chain, brain 4 | |

[0645] Peptide Information

| | | | | Start | | |
|---|---|---|---|---|---|---|
| Calc. Mass | Obsrv.Mass | ±da | ±ppm | Seq. | End Seq. | Sequence |
| 814.4893 | 814.5114 | .0221 | 27 | 1646 | 1652 | RPLVSSR |
| 818.4254 | 818.405 | −.0204 | −25 | 2372 | 2378 | ELDNVTK |
| 818.4254 | 818.405 | −.0204 | −25 | 2372 | 2378 | ELDNVTK |
| 829.5142 | 829.4913 | −.0229 | −28 | 1347 | 1353 | NILQTLK |
| 830.4519 | 830.4764 | .0245 | 30 | 1195 | 1200 | VLWEQR |
| 856.5251 | 856.5228 | −.0023 | −3 | 1256 | 1263 | LLSTLGPR |
| 877.4196 | 877.437 | .0174 | 20 | 3271 | 3277 | LQTEACR |
| 877.5002 | 877.437 | −.0632 | −72 | 3544 | 3551 | QHLLPGGR |
| 891.4539 | 891.4531 | −.0008 | −1 | 2657 | 2663 | CQAMLLR |
| 908.5312 | 908.4479 | −.0833 | −92 | 1036 | 1043 | HALQLAQK |
| 923.4806 | 923.4602 | −.0204 | −22 | 1571 | 1578 | AHQGQVQR |
| 923.5057 | 923.4602 | −.0455 | −49 | 10 | 18 | ELLGAAGHR |
| 980.473 | 980.4961 | .0231 | 24 | 1 | 9 | MAGQPHSPR |
| 983.5057 | 983.431 | −.0747 | −76 | 2235 | 2241 | KHWEDLR |
| 986.4901 | 986.4275 | −.0626 | −63 | 2326 | 2333 | NRDPEEVK |
| 1002.4963 | 1002.4139 | −.0824 | −82 | 2248 | 2255 | GQELEDRR |
| 1012.5323 | 1012.4543 | −.078 | −77 | 3180 | 3187 | YPHIQAQR |
| 1016.5483 | 1016.5704 | .0221 | 22 | 507 | 514 | RQEEVTVR |
| 1042.564 | 1042.4867 | −.0773 | −74 | 1857 | 1866 | ATSLPNNVAR |
| 1057.5571 | 1057.5472 | −.0099 | −9 | 3663 | 3671 | DARPGCLLR |
| 1057.5571 | 1057.5472 | −.0099 | −9 | 3663 | 3671 | DARPGCLLR |
| 1085.5698 | 1085.4945 | −.0753 | −69 | 1086 | 1094 | QVQEQVAQR |
| 1089.4994 | 1089.5704 | .071 | 65 | 2491 | 2500 | AQMDTSPAPR |
| 1089.4994 | 1089.5704 | .071 | 65 | 2491 | 2500 | AQMDTSPAPR |
| 1103.6307 | 1103.588 | −.0427 | −39 | 2316 | 2325 | SISDLSLQLK |
| 1109.5231 | 1109.5684 | .0453 | 41 | 2588 | 2595 | MERWLCSK |
| 1136.6171 | 1136.5674 | −.0497 | −44 | 1368 | 1377 | HVEALQQVGR |
| 1142.6277 | 1142.5398 | −.0879 | −77 | 373 | 382 | LQTALQAQNR |
| 1217.6195 | 1217.6008 | −.0187 | −15 | 2384 | 2394 | EALIQALDCGK |
| 1230.6688 | 1230.7039 | .0351 | 29 | 3635 | 3647 | ALGSTAAQSL |
| | | | | | | SPK |
| 1442.8101 | 1442.7466 | −.0635 | −44 | 2061 | 2073 | LEEILAAQEVS |
| | | | | | | LK |
| 1753.9205 | 1753.8547 | −.0658 | −38 | 2 | 18 | AGQPHSPREL |
| | | | | | | LGAAGH R |
| 1753.9205 | 1753.8547 | −.0658 | −38 | 2 | 18 | AGQPHSPREL |
| | | | | | | LGAAGHR |

| | |
|---|---|
| Tax_Id = 9606 Gene_Symbol = CCBL2 | IPI00465373 |
| Isoform 1 of Kynurenine--oxoglutarate | |
| transaminase 3 | |

[0646] Peptide Information

| Calc. | Obsrv. | | | Start | End | |
|---|---|---|---|---|---|---|
| Mass | Mass | ±da | ±ppm | Seq. | Seq. | Sequence |
| 830.4341 | 830.4764 | .0423 | 51 | 400 | 405 | WMTKHK |
| 923.5197 | 923.4602 | −.0595 | −64 | 26 | 34 | ILGFSTS |
| | | | | | | AK |
| 923.5197 | 923.4602 | −.0595 | −64 | 26 | 34 | ILGFSTS |
| | | | | | | AK |
| 955.507 | 955.4167 | −.0903 | −95 | 397 | 403 | FVKWMTK |
| 986.5193 | 986.4275 | −.0918 | −93 | 109 | 116 | ALSYLYEK |
| 1040.5524 | 1040.5715 | .0191 | 18 | 422 | 429 | SQFEKFVR |
| 1042.4476 | 1042.4867 | .0391 | 38 | 389 | 396 | NNEPYDYK |
| 1055.5554 | 1055.5176 | −.0378 | −36 | 35 | 43 | MSLKFT |
| | | | | | | NAK |
| 1116.6023 | 1116.5959 | −.0064 | −6 | 427 | 434 | FVRFCFIK |
| 1623.8047 | 1623.7913 | −.0134 | −8 | 407 | 421 | LSAIPVSA |
| | | | | | | FCNSETK |
| 1753.9484 | 1753.8547 | −.0937 | −53 | 272 | 288 | TITIGSAG |
| | | | | | | KTFSVTG |
| | | | | | | WK |
| 1753.9484 | 1753.8547 | −.0937 | −53 | 272 | 288 | TITIGSAG |
| | | | | | | KTFSVTG |
| | | | | | | WK |

| | |
|---|---|
| Tax_Id = 9606 Gene_Symbol = ARHGAP29 | IPI00152011 |
| Isoform 1 of Rho GTPase-activating | |
| protein 29 | |

[0647] Peptide Information

| Calc. | Obsrv. | | | Start | End | |
|---|---|---|---|---|---|---|
| Mass | Mass | ±da | ±ppm | Seq. | Seq. | Sequence |
| 818.4553 | 818.405 | −.0503 | −61 | 708 | 714 | VCGNKIK |
| 818.4553 | 818.405 | −.0503 | −61 | 708 | 714 | VCGNKIK |
| 932.5597 | 932.4811 | −.0786 | −84 | 85 | 92 | VLKSIMNK |
| 950.436 | 950.4933 | .0573 | 60 | 298 | 304 | NEMEKQR |
| 1003.4955 | 1003.3978 | −.0977 | −97 | 1050 | 1058 | NPAFEG |
| | | | | | | VNR |
| 1018.5237 | 1018.5897 | .066 | 65 | 318 | 326 | MLEAEN |
| | | | | | | ALK |
| 1018.5237 | 1018.5897 | .066 | 65 | 318 | 326 | MLEAEN |
| | | | | | | ALK |
| | 1018.5897 | | | | | |
| 1040.5007 | 1040.5715 | .0708 | 68 | 828 | 836 | VVDHAE |
| | | | | | | ENK |
| 1055.464 | 1055.5176 | .0536 | 51 | 947 | 955 | ATSFEE |
| | | | | | | SER |
| 1057.6517 | 1057.5472 | −.1045 | −99 | 289 | 297 | FVQPLL |
| | | | | | | GRK |
| 1057.6517 | 1057.5472 | −.1045 | −99 | 289 | 297 | FVQPLL |
| | | | | | | GRK |
| 1091.515 | 1091.5599 | .0449 | 41 | 690 | 698 | ICASEI |
| | | | | | | ENR |
| 1102.6255 | 1102.5885 | −.037 | −34 | 221 | 229 | NIVSWV |
| | | | | | | EKK |
| 1109.6313 | 1109.5684 | −.0629 | −57 | 1025 | 1034 | LLLASP |
| | | | | | | PNER |
| 1116.5031 | 1116.5959 | .0928 | 83 | 64 | 72 | EAIFSD |
| | | | | | | CFK |

| | |
|---|---|
| Tax_Id = 9606 Gene_Symbol = SNX7 | IPI00942419 |
| Isoform 1 of Sorting nexin-7 | |

[0648] Peptide Information

| Calc. | Obsrv. | | | Start | End | |
|---|---|---|---|---|---|---|
| Mass | Mass | ±da | ±ppm | Seq. | Seq. | Sequence |
| 896.3964 | 896.4366 | .0402 | 45 | 252 | 258 | CCKATEK |
| 935.4251 | 935.3341 | −.091 | −97 | 244 | 251 | DVASCIDR |
| 961.3971 | 961.4734 | .0763 | 79 | 216 | 222 | EYFDEMK |
| 961.3971 | 961.4734 | .0763 | 79 | 216 | 222 | EYFDEMK |
| 1018.4985 | 1018.4394 | −.0591 | −58 | 323 | 331 | VECANN |
| | | | | | | ALK |
| 1018.4985 | 1018.4394 | −.0591 | −58 | 323 | 331 | VECANN |
| | | | | | | ALK |
| 1146.5637 | 1146.4998 | −.0639 | −56 | 289 | 298 | DQIQAEL |
| | | | | | | DSK |
| 1312.6281 | 1312.5774 | −.0507 | −39 | 109 | 118 | FNDDFIE |
| | | | | | | TRR |
| 1312.6281 | 1312.5774 | −.0507 | −39 | 109 | 118 | FNDDFIE |
| | | | | | | TRR |
| 1383.5814 | 1383.5829 | .0015 | 1 | 244 | 254 | DVASCIDR |
| | | | | | | CCK |

| | |
|---|---|
| Tax_Id = 9606 Gene_Symbol = HSP90AB5P | IPI00556622 |
| Heat shock protein 90Be | |

[0649] Peptide Information

| | Obsrv. | | | Start | End | |
|---|---|---|---|---|---|---|
| Calc. Mass | Mass | ±da | ±ppm | Seq. | Seq. | Sequence |
| 847.3511 | 847.329 | −.0221 | −26 | 1 | 7 | MGYMMAK |
| 919.4367 | 919.5223 | .0856 | 93 | 26 | 33 | AEVDKDDK |
| 959.451 | 959.4409 | −.0101 | −11 | 1 | 8 | MGYMMAKK |

| | |
|---|---|
| Tax_Id = 9606 Gene_Symbol = | IPI00888272 |
| LOC100131519 similar to hCG1651476 | |

[0650] Peptide Information

| Calc. | Obsrv. | | | Start | End | |
|---|---|---|---|---|---|---|
| Mass | Mass | ±da | ±ppm | Seq. | Seq. | Sequence |
| 831.4431 | 831.4774 | .0343 | 41 | 37 | 43 | LDARNSR |
| 997.5214 | 997.4683 | −.0531 | −53 | 6 | 12 | YRDLQFR |
| 1083.4636 | 1083.5062 | .0426 | 39 | 13 | 21 | DRDCSG |
| | | | | | | AFR |
| 1421.6447 | 1421.5438 | −.1009 | −71 | 100 | 110 | CKCVPQMQ |
| | | | | | | QSR |

| | |
|---|---|
| Tax_Id = 9606 Gene_Symbol = ZNF483 | IPI00478644 |
| Zinc finger protein 483 | |

[0651] Peptide Information

| Calc. | Obsrv. | | | Start | End | |
|---|---|---|---|---|---|---|
| Mass | Mass | ±da | ±ppm | Seq. | Seq. | Sequence |
| 919.4367 | 919.5223 | .0856 | 93 | 145 | 153 | EEAGDI |
| ASK | | | | | | |
| 1037.4647 | 1037.4038 | −.0609 | −59 | 43 | 52 | GNAADA |
| ESFR | | | | | | |
| 1350.6383 | 1350.5377 | −.1006 | −74 | 145 | 157 | EEAGDIAS |
| | | | | | | KSESK |
| 1421.6332 | 1421.5438 | −.0894 | −63 | 168 | 178 | EESEVRS |

| | |
|---|---|
| Tax_Id = 9606 Gene_Symbol = MTHFS | IPI00643098 |
| 8 kDa protein | |

[0652] Peptide Information

| Calc. | Obsrv. | | | Start | End | |
|---|---|---|---|---|---|---|
| Mass | Mass | ±da | ±ppm | Seq. | Seq. | Sequence |
| 809.4489 | 809.3715 | −.0774 | −96 | 9 | 15 | HGNRLGR |
| 880.4233 | 880.4501 | .0268 | 30 | 1 | 8 | MPGLGFDK |
| 1328.6528 | 1328.6581 | .0053 | 4 | 1 | 12 | MPGLGFD |
| | | | | | | KHGNR |

| | |
|---|---|
| 18/A18 | Instr./Gel Origin |
| [1] Sample Project | Instrument |
| 20110325 | Sample |
| | Name |

| | |
|---|---|
| Protein Name | Accession No. |
| Tax_Id = 9606 Gene_Symbol = | IPI00917278 |
| SETD2 120 kDa protein | |

[0653] Peptide Information

| Calc. | Obsrv. | | | Start | End | |
|---|---|---|---|---|---|---|
| Mass | Mass | ±da | ±ppm | Seq. | Seq. | Sequence |
| 818.4042 | 818.405 | .0008 | 1 | 608 | 613 | HLYEEK |
| 818.4042 | 818.405 | .0008 | 1 | 608 | 613 | HLYEEK |
| 829.4315 | 829.4913 | .0598 | 72 | 953 | 958 | DPQRWK |
| 891.4418 | 891.4531 | .0113 | 13 | 18 | 25 | TSENEAIK |
| 980.5047 | 980.4961 | −.0086 | −9 | 885 | 892 | DFSKNLEK |
| 1018.5779 | 1018.5897 | .0118 | 12 | 148 | 156 | ELDSLS |
| | | | | | | KVK |
| 1018.5779 | 1018.5897 | .0118 | 12 | 148 | 156 | ELDSLS |
| | | | | | | KVK |
| 1047.5615 | 1047.557 | −.0045 | −4 | 94 | 102 | GSELRM |
| | | | | | | INK |
| 1091.646 | 1091.5599 | −.0861 | −79 | 853 | 861 | FLLSLQ |
| | | | | | | KDK |
| 1102.6508 | 1102.5885 | −.0623 | −57 | 126 | 134 | KLDELP |
| | | | | | | IFK |
| 1103.5844 | 1103.588 | .0036 | 3 | 414 | 423 | SSEFLKH |
| | | | | | | AGK |

| | |
|---|---|
| Tax_Id = 9606 Gene_Symbol = CCBL2 | IPI00553183 |
| kynurenine--oxoglutarate transaminase | |
| 3 isoform 2 | |

[0654] Peptide Information

| Calc. | Obsrv. | | | Start | End | |
|---|---|---|---|---|---|---|
| Mass | Mass | ±da | ±ppm | Seq. | Seq. | Sequence |
| 830.4341 | 830.4764 | .0423 | 51 | 366 | 371 | WMTKHK |
| 908.52 | 908.4479 | −.0721 | −79 | 2 | 9 | SLKFTNAK |
| 955.507 | 955.4167 | −.0903 | −95 | 363 | 369 | FVKWMTK |
| 986.5193 | 986.4275 | −.0918 | −93 | 75 | 82 | ALSYLYEK |
| 1040.5524 | 1040.5715 | .0191 | 18 | 388 | 395 | SQFEKFVR |
| 1042.4476 | 1042.4867 | .0391 | 38 | 355 | 362 | NNEPYDYK |
| 1055.5554 | 1055.51 | — | −36 | 1 | 9 | MSLKF |
| 1116.6023 | 1116.59 | — | — | 393 | 40 | FVRFC |
| 1623.8047 | 1623.79 | — | — | 373 | 38 | LSAIPVS |
| | | | | | | AFC |
| 1753.9484 | 1753.85 | — | −53 | 238 | 25 | TITIGSAG |
| | | | | | | KTF |
| 1753.9484 | 1753.85 | — | −53 | 238 | 25 | TITIGSAG |
| | | | | | | KTF |

| | |
|---|---|
| Tax_Id = 9606 Gene_Symbol = SPTBN5 | IPI00219168 |
| Spectrin beta chain, brain 4 | |

[0655] Peptide Information

| | Obsrv. | | | Start | End | |
|---|---|---|---|---|---|---|
| Calc. Mass | Mass | ±da | ±ppm | Seq. | Seq. | Sequence |
| 814.4893 | 814.5114 | .0221 | 27 | 1646 | 1652 | RPLVSSR |
| 818.4254 | 818.405 | −.0204 | −25 | 2372 | 2378 | ELDNVTK |
| 818.4254 | 818.405 | −.0204 | −25 | 2372 | 2378 | ELDNVTK |
| 829.5142 | 829.4913 | −.0229 | −28 | 1347 | 1353 | NILQTLK |
| 830.4519 | 830.4764 | .0245 | 30 | 1195 | 1200 | VLWEQR |
| 856.5251 | 856.5228 | −.0023 | −3 | 1256 | 1263 | LLSTLGPR |
| 877.4196 | 877.437 | .0174 | 20 | 3271 | 3277 | LQTEACR |
| 877.5002 | 877.437 | −.0632 | −72 | 3544 | 3551 | QHLLPGGR |
| 891.4539 | 891.4531 | −.0008 | −1 | 2657 | 2663 | CQAMLLR |
| 908.5312 | 908.4479 | −.0833 | −92 | 1036 | 1043 | HALQLAQK |
| 923.4806 | 923.4602 | −.0204 | −22 | 1571 | 1578 | AHQGQVQR |
| 923.5057 | 923.4602 | −.0455 | −49 | 10 | 18 | ELLGAAGHR |
| 980.473 | 980.4961 | .0231 | 24 | 1 | 9 | MAGQPHSPR |
| 983.5057 | 983.431 | −.0747 | −76 | 2235 | 2241 | KHWEDLR |
| 986.4901 | 986.4275 | −.0626 | −63 | 2326 | 2333 | NRDPEEVK |
| 1002.4963 | 1002.4139 | −.0824 | −82 | 2248 | 2255 | GQELEDRR |
| 1012.5323 | 1012.4543 | −.078 | −77 | 3180 | 3187 | YPHIQAQR |
| 1016.5483 | 1016.5704 | .0221 | 22 | 507 | 514 | RQEEVTVR |
| 1042.564 | 1042.4867 | −.0773 | −74 | 1857 | 1866 | ATSLPNNVAR |
| 1057.5571 | 1057.5472 | −.0099 | −9 | 3663 | 3671 | DARPGCLLR |
| 1057.5571 | 1057.5472 | −.0099 | −9 | 3663 | 3671 | DARPGCLLR |
| 1085.5698 | 1085.4945 | −.0753 | −69 | 1086 | 1094 | QVQEQVAQR |
| 1089.4994 | 1089.5704 | .071 | 65 | 2491 | 2500 | AQMDTSPAPR |
| 1089.4994 | 1089.5704 | .071 | 65 | 2491 | 2500 | AQMDTSPAPR |
| 1103.6307 | 1103.588 | −.0427 | −39 | 2316 | 2325 | SISDLSLQLK |
| 1109.5231 | 1109.5684 | .0453 | 41 | 2588 | 2595 | MERWLCSK |
| 1136.6171 | 1136.5674 | −.0497 | −44 | 1368 | 1377 | HVEALQQVGR |
| 1142.6277 | 1142.5398 | −.0879 | −77 | 373 | 382 | LQTALQAQNR |
| 1217.6195 | 1217.6008 | −.0187 | −15 | 2384 | 2394 | EALIQALDCGK |
| 1230.6688 | 1230.7039 | .0351 | 29 | 3635 | 3647 | ALGSTAAQSL |
| | | | | | | SPK |
| 1442.8101 | 1442.7466 | −.0635 | −44 | 2061 | 2073 | LEEILAAQEVS |
| | | | | | | LK |
| 1753.9205 | 1753.8547 | −.0658 | −38 | 2 | 18 | AGQPHSPREL |
| | | | | | | LGAAGH R |
| 1753.9205 | 1753.8547 | −.0658 | −38 | 2 | 18 | AGQPHSPREL |
| | | | | | | LGAAGHR |

| | |
|---|---|
| Tax_Id = 9606 Gene_Symbol = CCBL2 Isoform 1 of | IPI00465373 |
| Kynurenine--oxoglutarate transaminase 3 | |

[0656] Peptide Information

| | Obsrv. | | | Start | End | |
|---|---|---|---|---|---|---|
| Calc. Mass | Mass | ±da | ±ppm | Seq. | Seq. | Sequence |
| 830.4341 | 830.4764 | .0423 | 51 | 400 | 405 | WMTKHK |
| 923.5197 | 923.4602 | −.0595 | −64 | 26 | 34 | ILGFSTSAK |
| 923.5197 | 923.4602 | −.0595 | −64 | 26 | 34 | ILGFSTSAK |
| 955.507 | 955.4167 | −.0903 | −95 | 397 | 403 | FVKWMTK |
| 986.5193 | 986.4275 | −.0918 | −93 | 109 | 116 | ALSYLYEK |
| 1040.5524 | 1040.5715 | .0191 | 18 | 422 | 429 | SQFEKFVR |
| 1042.4476 | 1042.4867 | .0391 | 38 | 389 | 396 | NNEPYDYK |
| 1055.5554 | 1055.5176 | −.0378 | −36 | 35 | 43 | MSLKFTNAK |
| 1116.6023 | 1116.5959 | −.0064 | −6 | 427 | 434 | FVRFCFIK |
| 1623.8047 | 1623.7913 | −.0134 | −8 | 407 | 421 | LSAIPVSAFCNS |
| | | | | | | ETK |
| 1753.9484 | 1753.8547 | −.0937 | −53 | 272 | 288 | TITIGSAGKTFS |
| | | | | | | VTGWK |
| 1753.9484 | 1753.8547 | −.0937 | −53 | 272 | 288 | TITIGSAGKTFS |
| | | | | | | VTGWK |

| | |
|---|---|
| Tax_Id = 9606 Gene_Symbol = ARHGAP29 Isoform 1 of | IP100152011 |
| Rho GTPase-activating protein 29 | |

[0657] Peptide Information

| | Obsrv. | | | Start | End | |
|---|---|---|---|---|---|---|
| Calc. Mass | Mass | ±da | ±ppm | Seq. | Seq. | Sequence |
| 818.4553 | 818.405 | −.0503 | −61 | 708 | 714 | VCGNKIK |
| 818.4553 | 818.405 | −.0503 | −61 | 708 | 714 | VCGNKIK |
| 932.5597 | 932.4811 | −.0786 | −84 | 85 | 92 | VLKSIMNK |
| 950.436 | 950.4933 | .0573 | 60 | 298 | 304 | NEMEKQR |
| 1003.4955 | 1003.3978 | −.0977 | −97 | 1050 | 1058 | NPAFEGVNR |
| 1018.5237 | 1018.5897 | .066 | 65 | 318 | 326 | MLEAENALK |
| 1018.5237 | 1018.5897 | .066 | 65 | 318 | 326 | MLEAENALK |
| | 1018.5897 | | | | | |
| 1040.5007 | 1040.5715 | .0708 | 68 | 828 | 836 | VVDHAEENK |
| 1055.464 | 1055.5176 | .0536 | 51 | 947 | 955 | ATSFEESER |
| 1057.6517 | 1057.5472 | −.1045 | −99 | 289 | 297 | FVQPLLGRK |
| 1057.6517 | 1057.5472 | −.1045 | −99 | 289 | 297 | FVQPLLGRK |
| 1091.515 | 1091.5599 | .0449 | 41 | 690 | 698 | ICASEIENR |
| 1102.6255 | 1102.5885 | −.037 | −34 | 221 | 229 | NIVSWVEKK |
| 1109.6313 | 1109.5684 | −.0629 | −57 | 1025 | 1034 | LLLASPPNER |
| 1116.5031 | 1116.5959 | .0928 | 83 | 64 | 72 | EAIFSDCFK |

| | |
|---|---|
| Tax_Id = 9606 Gene_Symbol =ARHGAP29 Isoform 2 of | IPI00646444 |
| Rho GTPase-activating protein 29 | |

[0658] Peptide Information

| | Obsrv. | | | Start | End | |
|---|---|---|---|---|---|---|
| Calc. Mass | Mass | ±da | ±ppm | Seq. | Seq. | Sequence |
| 932.5597 | 932.4811 | −.0786 | −84 | 85 | 92 | VLKSIMNK |
| 950.436 | 950.4933 | .0573 | 60 | 298 | 304 | NEMEKQR |
| 1018.5237 | 1018.5897 | .066 | 65 | 318 | 326 | MLEAENALK |
| 1018.5237 | 1018.5897 | .066 | 65 | 318 | 326 | MLEAENALK |
| 1057.6517 | 1057.5472 | −.1045 | −99 | 289 | 297 | FVQPLLGRK |
| 1057.6517 | 1057.5472 | −.1045 | −99 | 289 | 297 | FVQPLLGRK |
| 1102.6255 | 1102.5885 | −.037 | −34 | 221 | 229 | NIVSWVEKK |
| 1116.5031 | 1116.5959 | .0928 | 83 | 64 | 72 | EAIFSDCFK |

| | |
|---|---|
| Tax_Id = 9606 Gene_Symbol = SETD2 231 kDa protein | IPI00917114 |

[0659] Peptide Information

| | Obsrv. | | | Start | End | |
|---|---|---|---|---|---|---|
| Calc. Mass | Mass | ±da | ±ppm | Seq. | Seq. | Sequence |
| 818.4042 | 818.405 | .0008 | 1 | 608 | 613 | HLYEEK |
| 818.4042 | 818.405 | .0008 | 1 | 608 | 613 | HLYEEK |
| 829.4315 | 829.4913 | .0598 | 72 | 953 | 958 | DPQRWK |
| 840.4283 | 840.3886 | −.0397 | −47 | 2017 | 2022 | ELKYCK |
| 877.4639 | 877.437 | −.0269 | −31 | 1538 | 1545 | GRDAVGFR |
| 877.4639 | 877.437 | −.0269 | −31 | 1538 | 1545 | GRDAVGFR |
| 891.4418 | 891.4531 | .0113 | 13 | 18 | 25 | TSENEAIK |
| 954.4778 | 954.4321 | −.0457 | −48 | 1996 | 2003 | ITTTEDFK |
| 980.5047 | 980.4961 | −.0086 | −9 | 885 | 892 | DFSKNLEK |
| 1018.5779 | 1018.5897 | .0118 | 12 | 148 | 156 | ELDSLSKVK |
| 1018.5779 | 1018.5897 | .0118 | 12 | 148 | 156 | ELDSLSKVK |
| 1047.5615 | 1047.557 | −.0045 | −4 | 94 | 102 | GSELRMINK |
| 1091.646 | 1091.5599 | −.0861 | −79 | 853 | 861 | FLLSLQKDK |
| 1102.6508 | 1102.5885 | −.0623 | −57 | 126 | 134 | KLDELPIFK |
| 1103.5844 | 1103.588 | .0036 | 3 | 414 | 423 | SSEFLKHAGK |
| 1753.8909 | 1753.8547 | −.0362 | −21 | 1897 | 1910 | DPEGKIYYYH |
| | | | | | | VITR |
| 1753.9385 | 1753.8547 | −.0838 | −48 | 1137 | 1151 | WTVNGQLRV |
| | | | | | | GFFTTK |

| | |
|---|---|
| Tax_Id = 9606 Gene_Symbol = SETD2 Isoform 2 of | IPI00796144 |
| Histone-lysine N-methyltransferase | |
| SETD2 | |

[0660] Peptide Information

| | | | | Start | End | |
|---|---|---|---|---|---|---|
| Calc. Mass | Obsrv. Mass | ±da | ±ppm | Seq. | Seq. | Sequence |
| 818.4042 | 818.405 | .0008 | 1 | 1111 | 1116 | HLYEEK |
| 818.4042 | 818.405 | .0008 | 1 | 1111 | 1116 | HLYEEK |
| 829.4315 | 829.4913 | .0598 | 72 | 1456 | 1461 | DPQRWK |
| 840.421 | 840.3886 | −.0324 | −39 | 415 | 421 | TNLSYSR |
| 891.4418 | 891.4531 | .0113 | 13 | 521 | 528 | TSENEAIK |
| 980.5047 | 980.4961 | −.0086 | −9 | 1388 | 1395 | DFSKNLEK |
| 983.4905 | 983.431 | −.0595 | −60 | 386 | 393 | DTRYVSSR |
| 1018.5779 | 1018.5897 | .0118 | 12 | 651 | 659 | ELDSLSKVK |
| 1018.5779 | 1018.5897 | .0118 | 12 | 651 | 659 | ELDSLSKVK |
| 1032.5837 | 1032.6023 | .0186 | 18 | 3 | 11 | QLQPQPPPK |
| 1042.4225 | 1042.4867 | .0642 | 62 | 425 | 432 | SHYYDSDR |
| 1047.5615 | 1047.557 | −.0045 | −4 | 597 | 605 | GSELRMINK |
| 1056.532 | 1056.5374 | .0054 | 5 | 482 | 490 | DLRTSSYSK |
| 1091.646 | 1091.5599 | −.0861 | −79 | 1356 | 1364 | FLLSLQKDK |
| 1102.6508 | 1102.5885 | −.0623 | −57 | 629 | 637 | KLDELPIFK |
| 1103.5844 | 1103.588 | .0036 | 3 | 917 | 926 | SSEFLKHAGK |
| 1136.5881 | 1136.5674 | −.0207 | −18 | 43 | 53 | GPMFKGVAS |
| | | | | | | SR |
| 1753.9385 | 1753.8547 | −.0838 | −48 | 1640 | 1654 | WTVNGQLRV |
| | | | | | | GFFTTK |
| 1753.9385 | 1753.8547 | −.0838 | −48 | 1640 | 1654 | WTVNGQLRV |
| | | | | | | GFFTTK |

| | |
|---|---|
| Tax_Id = 9606 Gene_Symbol = - Conserved | IPI00017234 |
| hypothetical protein | |

[0661] Peptide Information

| | Obsrv. | | | Start | End | |
|---|---|---|---|---|---|---|
| Calc. Mass | Mass | ±da | ±ppm | Seq. | Seq. | Sequence |
| 818.4042 | 818.405 | .0008 | 1 | 92 | 97 | HLYEEK |
| 818.4042 | 818.405 | .0008 | 1 | 92 | 97 | HLYEEK |
| 877.46 | 877.437 | −.023 | −26 | 1 | 7 | MTPLPYR |
| 877.46 | 877.437 | −.023 | −26 | 1 | 7 | MTPLPYR |
| 1120.5931 | 1120.5658 | −.0273 | −24 | 1 | 9 | MTPLPYRSR |
| 1136.5881 | 1136.5674 | −.0207 | −18 | 1 | 9 | MTPLPYRSR |

| | |
|---|---|
| Tax_Id = 9606 Gene_Symbol = HMMR cDNA FLJ53375, | IPI00941941 |
| highly similar to Hyaluronan mediated motility | |
| receptor | |

[0662] Peptide Information

| | Obsrv. | | | Start | End | |
|---|---|---|---|---|---|---|
| Calc. Mass | Mass | ±da | ±ppm | Seq. | Seq. | Sequence |
| 818.473 | 818.405 | −.068 | −83 | 630 | 636 | SEVSKLR |
| 818.473 | 818.405 | −.068 | −83 | 630 | 636 | SEVSKLR |
| 830.4366 | 830.4764 | .0398 | 48 | 52 | 58 | QNLNVDK |
| 832.4523 | 832.4264 | −.0259 | −31 | 385 | 391 | SRAEELK |
| 840.3888 | 840.3886 | −.0002 | 0 | 158 | 164 | MRGMMAK |
| 877.4261 | 877.437 | .0109 | 12 | 178 | 185 | SLEESQGK |
| 877.4261 | 877.437 | .0109 | 12 | 178 | 185 | SLEESQGK |
| 923.4217 | 923.4602 | .0385 | 42 | 131 | 138 | FSENGNQK |
| 923.4217 | 923.4602 | .0385 | 42 | 131 | 138 | FSENGNQK |
| 932.5411 | 932.4811 | −.06 | −64 | 123 | 130 | TNELLKSK |
| 946.5641 | 946.4946 | −.0695 | −73 | 142 | 149 | ILSLELMK |
| 1018.5754 | 1018.5897 | .0143 | 14 | 1 | 9 | MSFPKAPLK |
| 1018.5778 | 1018.5897 | .0119 | 12 | 496 | 504 | SALKETEIK |
| 1047.5503 | 1047.557 | .0067 | 6 | 270 | 277 | CQLLEKEK |
| 1064.5986 | 1064.5959 | −.0027 | −3 | 505 | 513 | EITVSFLQK |
| 1089.5535 | 1089.5704 | .0169 | 16 | 378 | 386 | QLEEEAKSR |
| 1089.5535 | 1089.5704 | .0169 | 16 | 378 | 386 | QLEEEAKSR |
| 1103.5327 | 1103.588 | .0553 | 50 | 531 | 539 | QLEDEEG |
| | | | | | | RK |
| 1217.626 | 1217.6008 | −.0252 | −21 | 106 | 115 | IQDLETEL |
| | | | | | | EK |
| 1363.67 | 1363.7206 | .0506 | 37 | 623 | 634 | DENSQLK |
| | | | | | | SEVSK |

| | |
|---|---|
| Tax_Id = 9606 Gene_Symbol = SETD2 | IPI00916993 |
| Uncharacterized protein | |

[0663] Peptide Information

| | Obsrv. | | | Start | End | |
|---|---|---|---|---|---|---|
| Calc. Mass | Mass | ±da | ±ppm | Seq. | Seq. | Sequence |
| 818.4042 | 818.405 | .0008 | 1 | 1067 | 1072 | HLYEEK |
| 818.4042 | 818.405 | .0008 | 1 | 1067 | 1072 | HLYEEK |
| 840.421 | 840.3886 | −.0324 | −39 | 371 | 377 | TNLSYSR |
| 891.4418 | 891.4531 | .0113 | 13 | 477 | 484 | TSENEAIK |
| 983.4905 | 983.431 | −.0595 | −60 | 342 | 349 | DTRYVSSR |
| 998.5087 | 998.4193 | −.0894 | −90 | 1 | 9 | MFKGVASSR |
| 1018.5779 | 1018.5897 | .0118 | 12 | 607 | 615 | ELDSLSKVK |
| 1018.5779 | 1018.5897 | .0118 | 12 | 607 | 615 | ELDSLSKVK |
| 1042.4225 | 1042.4867 | .0642 | 62 | 381 | 388 | SHYYDSDR |
| 1047.5615 | 1047.557 | −.0045 | −4 | 553 | 561 | GSELRMINK |
| 1056.532 | 1056.5374 | .0054 | 5 | 438 | 446 | DLRTSSYSK |
| 1091.646 | 1091.5599 | −.0861 | −79 | 1312 | 1320 | FLLSLQKDK |
| 1102.6508 | 1102.5885 | −.0623 | −57 | 585 | 593 | KLDELPIFK |
| 1103.5844 | 1103.588 | .0036 | 3 | 873 | 882 | SSEFLKHAGK |

| | |
|---|---|
| Tax_Id = 9606 Gene_Symbol = CCDC110 Isoform 2 of | IPI00784583 |
| Coiled-coil domain-containing protein | |
| 110 | |

[0664] Peptide Information

| | | | | Start | End | |
|---|---|---|---|---|---|---|
| Calc. Mass | Obsrv. Mass | ±da | ±ppm | Seq. | Seq. | Sequence |
| 946.5203 | 946.4946 | −.0257 | −27 | 23 | 31 | ILNSSEGVK |
| 954.4778 | 954.4321 | −.0457 | −48 | 733 | 740 | EYLSLSDK |
| 983.5269 | 983.431 | −.0959 | −98 | 687 | 694 | KHSQENIK |
| 986.4326 | 986.4275 | −.0051 | −5 | 93 | 100 | SHHFEDSK |
| 987.504 | 987.4055 | −.0985 | −100 | 306 | 313 | LSKSEMHR |
| 1002.4727 | 1002.4139 | −.0588 | −59 | 295 | 301 | FHVHFCR |
| 1012.4993 | 1012.4543 | −.045 | −44 | 1 | 8 | MSPEKQHR |
| 1016.5887 | 1016.5704 | −.0183 | −18 | 359 | 366 | ERQPFL |
| | | | | | | VK |
| 1032.6453 | 1032.6023 | −.043 | −42 | 186 | 194 | SKITVPF |
| | | | | | | LK |
| 1033.5347 | 1033.5358 | .0011 | 1 | 210 | 217 | QMKEEL |
| | | | | | | QK |
| 1033.5347 | 1033.5358 | .0011 | 1 | 210 | 217 | QMKEEL |
| | | | | | | QK |
| 1040.4718 | 1040.5715 | .0997 | 96 | 721 | 728 | DTLEFE |
| | | | | | | MR |
| 1056.4667 | 1056.5374 | .0707 | 67 | 721 | 728 | DTLEFE |
| | | | | | | MR |
| 1069.4727 | 1069.4808 | .0081 | 8 | 530 | 538 | MSIEME |
| | | | | | | AMK |
| 1069.4727 | 1069.4808 | .0081 | 8 | 530 | 538 | MSIEME |
| | | | | | | AMK |
| 1085.4675 | 1085.4945 | .027 | 25 | 530 | 538 | MSIEME |
| | | | | | | AMK |
| 1104.5895 | 1104.5812 | −.0083 | −8 | 561 | 570 | EKSSLG |
| | | | | | | NELK |
| 1230.6589 | 1230.7039 | .045 | 37 | 330 | 339 | NITDLKF |
| | | | | | | HSR |

| | |
|---|---|
| Tax_Id = 9606 Gene_Symbol = SETD2 Isoform 1 of | IPI00307733 |
| Histone-lysine N-methyltransferase | |
| SETD2 | |

[0665] Peptide Information

| | | | | Start | End | |
|---|---|---|---|---|---|---|
| Calc. Mass | Obsrv. Mass | ±da | ±ppm | Seq. | Seq. | Sequence |
| 818.4042 | 818.405 | .0008 | 1 | 1111 | 1116 | HLYEEK |
| 818.4042 | 818.405 | .0008 | 1 | 1111 | 1116 | HLYEEK |
| 829.4315 | 829.4913 | .0598 | 72 | 1456 | 1461 | DPQRWK |
| 840.421 | 840.3886 | −.0324 | −39 | 415 | 421 | TNLSYSR |
| 877.4639 | 877.437 | −.0269 | −31 | 2041 | 2048 | GRDAVGFR |
| 877.4639 | 877.437 | −.0269 | −31 | 2041 | 2048 | GRDAVGFR |
| 891.4418 | 891.4531 | .0113 | 13 | 521 | 528 | TSENEAIK |
| 954.4778 | 954.4321 | −.0457 | −48 | 2499 | 2506 | ITTTEDFK |
| 980.5047 | 980.4961 | −.0086 | −9 | 1388 | 1395 | DFSKNLEK |
| 983.4905 | 983.431 | −.0595 | −60 | 386 | 393 | DTRYVSSR |
| 1018.5779 | 1018.5897 | .0118 | 12 | 651 | 659 | ELDSLSKVK |
| 1018.5779 | 1018.5897 | .0118 | 12 | 651 | 659 | ELDSLSKVK |
| 1032.5837 | 1032.6023 | .0186 | 18 | 3 | 11 | QLQPQPPPK |
| 1042.4225 | 1042.4867 | .0642 | 62 | 425 | 432 | SHYYDSDR |
| 1047.5615 | 1047.557 | −.0045 | −4 | 597 | 605 | GSELRMINK |
| 1056.532 | 1056.5374 | .0054 | 5 | 482 | 490 | DLRTSSYSK |
| 1091.646 | 1091.5599 | −.0861 | −79 | 1356 | 1364 | FLLSLQKDK |
| 1102.6508 | 1102.5885 | −.0623 | −57 | 629 | 637 | KLDELPIFK |
| 1103.5844 | 1103.588 | .0036 | 3 | 917 | 926 | SSEFLKHAGK |
| 1136.5881 | 1136.5674 | −.0207 | −18 | 43 | 53 | GPMFKGVASSR |
| 1753.8909 | 1753.8547 | −.0362 | −21 | 2400 | 2413 | DPEGKIYYYHVI |
| | | | | | | TR |
| 1753.9385 | 1753.8547 | −.0838 | −48 | 1640 | 1654 | WTVNGQLRVG |
| | | | | | | FFTTK |

| | |
|---|---|
| Tax_Id = 9606 Gene_Symbol = HDAC1 cDNA FLJ60860, | IPI00910637 |
| highly similar to Histone deacetylase 1 | |

[0666] Peptide Information

| Calc. Mass | Obsrv. Mass | ±da | ±ppm | Start Seq. | End Seq. | Sequence |
|---|---|---|---|---|---|---|
| 908.4254 | 908.4479 | .0225 | 25 | 1 | 8 | MAQTQGTR |
| 964.4921 | 964.5281 | .036 | 37 | 193 | 200 | VMTVSFHK |
| | 964.5281 | | | | | |
| 1040.4684 | 1040.5715 | .1031 | 99 | 67 | 74 | YHSDDYIK |
| 1064.5266 | 1064.5959 | .0693 | 65 | 1 | 9 | MAQTQGTRR |
| 1089.551 | 1089.5704 | .0194 | 18 | 51 | 58 | MEIYRPHK |
| 1089.551 | 1089.5704 | .0194 | 18 | 51 | 58 | MEIYRPHK |
| 1217.646 | 1217.6008 | −.0452 | −37 | 50 | 58 | KMEIYRPHK |
| 1442.6581 | 1442.7466 | .0885 | 61 | 78 | 89 | SIRPDNMSEYSK |
| 1623.8312 | 1623.7913 | −.0399 | −25 | 37 | 49 | MTHNLLLNYGLYR |

| | |
|---|---|
| Tax_Id = 9606 Gene_Symbol = HMMR Isoform 2 of | IPI00844515 |
| Hyaluronan mediated motility receptor | |

[0667] Peptide Information

| Calc. Mass | Obsrv. Mass | ±da | ±ppm | Start Seq. | End Seq. | Sequence |
|---|---|---|---|---|---|---|
| 818.473 | 818.405 | −.068 | −83 | 638 | 644 | SEVSKLR |
| 818.473 | 818.405 | −.068 | −83 | 638 | 644 | SEVSKLR |
| 830.4366 | 830.4764 | .0398 | 48 | 52 | 58 | QNLNVDK |
| 832.4523 | 832.4264 | −.0259 | −31 | 393 | 399 | SRAEELK |
| 840.3888 | 840.3886 | −.0002 | 0 | 166 | 172 | MRGMMAK |
| 877.4261 | 877.437 | .0109 | 12 | 186 | 193 | SLEESQGK |
| 877.4261 | 877.437 | .0109 | 12 | 186 | 193 | SLEESQGK |
| 923.4217 | 923.4602 | .0385 | 42 | 139 | 146 | FSENGNQK |
| 923.4217 | 923.4602 | .0385 | 42 | 139 | 146 | FSENGNQK |
| 932.5411 | 932.4811 | −.06 | −64 | 131 | 138 | TNELLKSK |
| 946.5641 | 946.4946 | −.0695 | −73 | 150 | 157 | ILSLELMK |
| 1018.5754 | 1018.5897 | .0143 | 14 | 1 | 9 | MSFPKAPLK |
| 1018.5778 | 1018.5897 | .0119 | 12 | 504 | 512 | SALKETEIK |
| 1047.5503 | 1047.557 | .0067 | 6 | 278 | 285 | CQLLEKEK |
| 1064.5986 | 1064.5959 | −.0027 | −3 | 513 | 521 | EITVSFLQK |
| 1089.5535 | 1089.5704 | .0169 | 16 | 386 | 394 | QLEEEAKSR |
| 1089.5535 | 1089.5704 | .0169 | 16 | 386 | 394 | QLEEEAKSR |
| 1103.5327 | 1103.588 | .0553 | 50 | 539 | 547 | QLEDEEGRK |
| 1217.626 | 1217.6008 | −.0252 | −21 | 90 | 99 | IQDLETELEK |
| 1363.67 | 1363.7206 | .0506 | 37 | 631 | 642 | DENSQLKSEVSK |

| | |
|---|---|
| Tax_Id = 9606 Gene_Symbol = SETD2 Isoform 3 of | IPI00442150 |
| Histone-lysine N-methyltransferase | |
| SETD2 | |

[0668] Peptide Information

| Calc. Mass | Obsrv. Mass | ±da | ±ppm | Start Seq. | End Seq. | Sequence |
|---|---|---|---|---|---|---|
| 818.4042 | 818.405 | .0008 | 1 | 1111 | 1116 | HLYEEK |
| 818.4042 | 818.405 | .0008 | 1 | 1111 | 1116 | HLYEEK |
| 829.4315 | 829.4913 | .0598 | 72 | 1456 | 1461 | DPQRWK |
| 840.421 | 840.3886 | −.0324 | −39 | 415 | 421 | TNLSYSR |
| 891.4418 | 891.4531 | .0113 | 13 | 521 | 528 | TSENEAIK |
| 980.5047 | 980.4961 | −.0086 | −9 | 1388 | 1395 | DFSKNLEK |
| 983.4905 | 983.431 | −.0595 | −60 | 386 | 393 | DTRYVSSR |
| 1018.5779 | 1018.5897 | .0118 | 12 | 651 | 659 | ELDSLSKVK |
| 1018.5779 | 1018.5897 | .0118 | 12 | 651 | 659 | ELDSLSKVK |
| 1032.5837 | 1032.6023 | .0186 | 18 | 3 | 11 | QLQPQPPPK |
| 1042.4225 | 1042.4867 | .0642 | 62 | 425 | 432 | SHYYDSDR |
| 1047.5615 | 1047.557 | −.0045 | −4 | 597 | 605 | GSELRMINK |
| 1056.532 | 1056.5374 | .0054 | 5 | 482 | 490 | DLRTSSYSK |
| 1091.646 | 1091.5599 | −.0861 | −79 | 1356 | 1364 | FLLSLQKDK |
| 1102.6508 | 1102.5885 | −.0623 | −57 | 629 | 637 | KLDELPIFK |
| 1103.5844 | 1103.588 | .0036 | 3 | 917 | 926 | SSEFLKHAGK |
| 1136.5881 | 1136.5674 | −.0207 | −18 | 43 | 53 | GPMFKGVASSR |

| | |
|---|---|
| Tax_Id = 9606 Gene_Symbol = NAV2 Isoform 3 of | IPI00815697 |
| Neuron navigator 2 | |

[0669] Peptide Information

| Calc. Mass | Obsrv. Mass | ±da | ±ppm | Start Seq. | End Seq. | Sequence |
|---|---|---|---|---|---|---|
| 818.4479 | 818.405 | −.0429 | −52 | 507 | 513 | RASVTER |
| 818.4479 | 818.405 | −.0429 | −52 | 507 | 513 | RASVTER |
| 877.4122 | 877.437 | .0248 | 28 | 276 | 284 | GGSTTANNR |
| 877.4122 | 877.437 | .0248 | 28 | 276 | 284 | GGSTTANNR |
| 923.4581 | 923.4602 | .0021 | 2 | 813 | 820 | FINTESGR |
| 923.4581 | 923.4602 | .0021 | 2 | 813 | 820 | FINTESGR |
| 946.5568 | 946.4946 | −.0622 | −66 | 41 | 49 | LGSKVEVSK |
| 1012.517 | 1012.4543 | −.0627 | −62 | 192 | 199 | QQQQQPQK |
| 1033.5135 | 1033.5358 | .0223 | 22 | 32 | 40 | AGPQPCYLK |
| 1033.5135 | 1033.5358 | .0223 | 22 | 32 | 40 | AGPQPCYLK |
| 1040.6099 | 1040.5715 | −.0384 | −37 | 1052 | 1062 | TKPSAPAGALK |
| 1057.6365 | 1057.5472 | −.0893 | −84 | 1152 | 1161 | IPKSSALVSR |
| 1057.6438 | 1057.5472 | −.0966 | −91 | 2 | 11 | PAILVASKMK |
| | 1057.5472 | | | | | |
| 1069.5425 | 1069.4808 | −.0617 | −58 | 2325 | 2333 | RAPWEDPAK |
| 1069.5425 | 1069.4808 | −.0617 | −58 | 2325 | 2333 | RAPWEDPAK |
| 1089.5283 | 1089.5704 | .0421 | 39 | 1727 | 1737 | GNGTAQSADLR |
| 1089.5283 | 1089.5704 | .0421 | 39 | 1727 | 1737 | GNGTAQSADLR |
| 1091.5957 | 1091.5599 | −.0358 | −33 | 2317 | 2325 | EGLQLYGRR |
| 1102.48 | 1102.5885 | .1085 | 98 | 286 | 294 | SQSFNNYDK |
| 1103.5691 | 1103.588 | .0189 | 17 | 1690 | 1698 | DSELNELRK |
| 1118.5841 | 1118.5358 | −.0483 | −43 | 1291 | 1300 | YPDVASPTLR |
| 1120.527 | 1120.5658 | .0388 | 35 | 981 | 990 | NSLWSGDDVK |
| 1134.561 | 1134.5808 | .0198 | 17 | 274 | 284 | TRGGSTTANNR |
| 1217.6195 | 1217.6008 | −.0187 | −15 | 1310 | 1320 | QVPIATAENMK |
| 1623.8813 | 1623.7913 | −.09 | −55 | 594 | 608 | LSSGLPQQK |
| | | | | | | PQLDGR |

| | |
|---|---|
| Tax_Id = 9606 Gene_Symbol = NAV2 Isoform 2 of | IPI00816751 |
| Neuron navigator 2 | |

[0670] Peptide Information

| Calc. Mass | Obsrv. Mass | ±da | ±ppm | Start Seq. | End Seq. | Sequence |
|---|---|---|---|---|---|---|
| 818.4479 | 818.405 | −.0429 | −52 | 507 | 513 | RASVTER |
| 818.4479 | 818.405 | −.0429 | −52 | 507 | 513 | RASVTER |
| 877.4122 | 877.437 | .0248 | 28 | 276 | 284 | GGSTTANNR |
| 877.4122 | 877.437 | .0248 | 28 | 276 | 284 | GGSTTANNR |
| 923.4581 | 923.4602 | .0021 | 2 | 813 | 820 | FINTESGR |
| 923.4581 | 923.4602 | .0021 | 2 | 813 | 820 | FINTESGR |
| 946.5568 | 946.4946 | −.0622 | −66 | 41 | 49 | LGSKVEVSK |
| 1012.517 | 1012.4543 | −.0627 | −62 | 192 | 199 | QQQQQPQK |
| 1033.5135 | 1033.5358 | .0223 | 22 | 32 | 40 | AGPQPCYLK |
| 1033.5135 | 1033.5358 | .0223 | 22 | 32 | 40 | AGPQPCYLK |
| 1040.6099 | 1040.5715 | −.0384 | −37 | 1052 | 1062 | TKPSAPAGALK |
| 1057.6365 | 1057.5472 | −.0893 | −84 | 1152 | 1161 | IPKSSALVSR |
| 1057.6438 | 1057.5472 | −.0966 | −91 | 2 | 11 | PAILVASKMK |
| 1069.5425 | 1069.4808 | −.0617 | −58 | 2328 | 2336 | RAPWEDPAK |
| 1069.5425 | 1069.4808 | −.0617 | −58 | 2328 | 2336 | RAPWEDPAK |
| 1089.5283 | 1089.5704 | .0421 | 39 | 1727 | 1737 | GNGTAQSADLR |
| 1089.5283 | 1089.5704 | .0421 | 39 | 1727 | 1737 | GNGTAQSADLR |
| 1091.5957 | 1091.5599 | −.0358 | −33 | 2320 | 2328 | EGLQLYGRR |
| 1102.48 | 1102.5885 | .1085 | 98 | 286 | 294 | SQSFNNYDK |
| | 1102.5885 | | | | | |
| 1103.5691 | 1103.588 | .0189 | 17 | 1690 | 1698 | DSELNELRK |
| 1118.5841 | 1118.5358 | −.0483 | −43 | 1291 | 1300 | YPDVASPTLR |
| 1120.527 | 1120.5658 | .0388 | 35 | 981 | 990 | NSLWSGDDVK |
| 1134.561 | 1134.5808 | .0198 | 17 | 274 | 284 | TRGGSTTANNR |
| 1217.6195 | 1217.6008 | −.0187 | −15 | 1310 | 1320 | QVPIATAENMK |
| 1623.8813 | 1623.7913 | −.09 | −55 | 594 | 608 | LSSGLPQQKPQ |
| | | | | | | LDGR |

| | |
|---|---|
| Tax_Id = 9606 Gene_Symbol = TSSK4 Isoform 2 of | IPI00414440 |
| Testis-specific serine/threonine-protein kinase 4 | |

[0671] Peptide Information

| Calc. Mass | Obsrv. Mass | ±da | ±ppm | Start Seq. | End Seq. | Sequence |
|---|---|---|---|---|---|---|
| 1016.592 | 1016.5704 | −.0216 | −21 | 279 | 286 | NLILQMLR |
| 1018.535 | 1018.5897 | .0547 | 54 | 148 | 157 | LMPSLSAAGR |
| 1018.535 | 1018.5897 | .0547 | 54 | 148 | 157 | LMPSLSAAGR |
| 1055.5481 | 1055.5176 | −.0305 | −29 | 330 | 338 | QHQSLQITT |
| 1103.6857 | 1103.588 | −.0977 | −89 | 49 | 58 | VMVAVKIISK |

| | |
|---|---|
| Tax_Id = 9606 Gene_Symbol = HMMR Isoform 3 of | IPI00337772 |
| Hyaluronan mediated motility receptor | |

[0672] Peptide Information

| Calc. Mass | Obsrv. Mass | ±da | ±ppm | Start Seq. | End Seq. | Sequence |
|---|---|---|---|---|---|---|
| 818.473 | 818.405 | −.068 | −83 | 654 | 660 | SEVSKLR |
| 818.473 | 818.405 | −.068 | −83 | 654 | 660 | SEVSKLR |
| 830.4366 | 830.4764 | .0398 | 48 | 52 | 58 | QNLNVDK |
| 832.4523 | 832.4264 | −.0259 | −31 | 409 | 415 | SRAEELK |
| 840.3888 | 840.3886 | −.0002 | 0 | 182 | 188 | MRGMMAK |
| 877.4261 | 877.437 | .0109 | 12 | 202 | 209 | SLEESQGK |
| 877.4261 | 877.437 | .0109 | 12 | 202 | 209 | SLEESQGK |
| 923.4217 | 923.4602 | .0385 | 42 | 155 | 162 | FSENGNQK |
| 923.4217 | 923.4602 | .0385 | 42 | 155 | 162 | FSENGNQK |
| 932.5411 | 932.4811 | −.06 | −64 | 147 | 154 | TNELLKSK |
| 946.5641 | 946.4946 | −.0695 | −73 | 166 | 173 | ILSLELMK |
| 1018.5754 | 1018.5897 | .0143 | 14 | 1 | 9 | MSFPKAPLK |
| 1018.5778 | 1018.5897 | .0119 | 12 | 520 | 528 | SALKETEIK |
| 1047.5503 | 1047.557 | .0067 | 6 | 294 | 301 | CQLLEKEK |
| 1064.5986 | 1064.5959 | −.0027 | −3 | 529 | 537 | EITVSFLQK |
| 1089.5535 | 1089.5704 | .0169 | 16 | 402 | 410 | QLEEEAKSR |
| 1089.5535 | 1089.5704 | .0169 | 16 | 402 | 410 | QLEEEAKSR |
| 1103.5327 | 1103.588 | .0553 | 50 | 555 | 563 | QLEDEEG |
| | | | | | | RK |
| 1217.626 | 1217.6008 | −.0252 | −21 | 106 | 115 | IQDLETEL |
| | | | | | | EK |
| 1363.67 | 1363.7206 | .0506 | 37 | 647 | 658 | DENSQLK |
| | | | | | | SEVSK |

4no matched protein found

| | | | | | | |
|---|---|---|---|---|---|---|
| 891.4 | 891.45 | 0.0344 | 3 | 7 | 84 | ESEDQKR |
| 982.4 | 982.43 | −0.0336 | — | 1 | 9 | MGGTTST |

### 6—AFOD

[0673] 4 new found proteins from fraction 42 which are named KH24 (SEQ ID NO. KH24), KH25 (SEQ ID NO. KH25), KH26 (SEQ ID NO. KH26) and KH27 (SEQ ID NO. KH27) and their functions are under investigation.

| | | | |
|---|---|---|---|
| | 155/G6 | | Instr./Gel Origin |
| | [1] Sample Project | | Instrument |
| | 20111201 | | Sample |
| | | | Name |
| Protein Name | | Accession No. | |

| | |
|---|---|
| Tax_Id = 9606 Gene_Symbol = | IPI00893693 |
| CCDC88A 137 kDa protein | |

KH24 (SEQ ID NO. KH24) Peptide Information

| | Obsrv. | | | Start | End | |
|---|---|---|---|---|---|---|
| Calc. Mass | Mass | ±da | ±ppm | Seq. | Seq. | Sequence |
| 879.4968 | 879.4153 | −0.0815 | −93 | 635 | 642 | KSSMVALK |
| 880.5138 | 880.4396 | −0.0742 | −84 | 129 | 135 | YKLLESK |
| 896.4584 | 896.4399 | −0.0185 | −21 | 365 | 371 | NLEVEHR |
| 985.5789 | 985.582 | 0.0031 | 3 | 16 | 23 | LRQQAEIK |
| 985.5789 | 985.582 | 0.0031 | 3 | 16 | 23 | LRQQAEIK |
| 1021.5272 | 1021.5333 | 0.0061 | 6 | 961 | 969 | ESSLSRQSK |
| 1021.5425 | 1021.5333 | −0.0092 | −9 | 178 | 185 | NYEALKQR |
| 1187.6267 | 1187.6656 | 0.0389 | 33 | 383 | 392 | QKGQLEDLEK |
| | 1187.6656 | | | | | |
| 1187.6267 | 1187.6656 | 0.0389 | 33 | 383 | 392 | QKGQLEDLEK |
| 1199.5903 | 1199.6674 | 0.0771 | 64 | 435 | 444 | ETEVLQTDHK |
| 1254.6212 | 1254.6615 | 0.0403 | 32 | 345 | 355 | QASEYESLISK |
| 1406.7274 | 1406.6833 | −0.0441 | −31 | 372 | 382 | DLEDRYNQLLK |
| 1406.7274 | 1406.6833 | −0.0441 | −31 | 372 | 382 | DLEDRYNQLLK |
| 1428.6754 | 1428.7153 | 0.0399 | 28 | 909 | 921 | SVSGKTPGDFYDR |
| 1479.6996 | 1479.7794 | 0.0798 | 54 | 875 | 887 | SSSQENLLDEVMK |
| 1502.8425 | 1502.8582 | 0.0157 | 10 | 78 | 90 | TLVTLREDLVSEK |
| 1727.9286 | 1727.8947 | −0.0339 | −20 | 223 | 237 | LIEVERNNATLQAEK |
| 2213.1084 | 2213.2441 | 0.1357 | 61 | 935 | 955 | KTEDTYFISS |
| | | | | | | AGKPTPGT |
| | | | | | | QGK |
| 2233.0918 | 2233.0076 | −0.0842 | −38 | 515 | 532 | TLLEQNMES |
| | | | | | | KDLFHVEQ R |
| 2233.0918 | 2233.2017 | 0.1099 | 49 | 515 | 532 | TLLEQNMESKDLFHVEQ |

IPI01012199

[0674] Protein Group

IPI00256861
R
Tax_Id = 9606 Gene_Symbol = MACF1
Uncharacterized protein
Tax_Id = 9606 Gene_Symbol = MACF1 Isoform 2 of
Microtubule-actin cross-linking factor 1, isoforms
1/2/3/5

| | | | | Start | End | |
|---|---|---|---|---|---|---|
| Calc. Mass | Obsrv. Mass | ±da | ±ppm | Seq. | Seq. | Sequence |
| 870.5229 | 870.5385 | 0.0156 | 18 | 3736 | 3743 | LMALGPIR |
| 870.5229 | 870.5385 | 0.0156 | 18 | 3736 | 3743 | LMALGPIR |
| 879.4935 | 879.4153 | −0.0782 | −89 | 1874 | 1881 | FVTISGQK |
| 880.441 | 880.4396 | −0.0014 | −2 | 2240 | 2246 | DFTELQK |
| 910.4265 | 910.4448 | 0.0183 | 20 | 3476 | 3482 | YSEIQDR |
| 910.4265 | 910.4448 | 0.0183 | 20 | 3476 | 3482 | YSEIQDR |
| 928.4669 | 928.4629 | −0.004 | −4 | 3652 | 3658 | KEVMEHR |
| 1021.5499 | 1021.5333 | −0.0166 | −16 | 2551 | 2558 | QQVQFMLK |
| 1021.5499 | 1021.5333 | −0.0166 | −16 | 2551 | 2558 | QQVQFMLK |
| 1106.5034 | 1106.5583 | 0.0549 | 50 | 1018 | 1026 | LEEEVEACK |
| 1170.6841 | 1170.6443 | −0.0398 | −34 | 3312 | 3321 | VVKAQIQEQK |
| 1187.6201 | 1187.6656 | 0.0455 | 38 | 2757 | 2766 | NCPISAKLER |
| 1187.6201 | 1187.6656 | 0.0455 | 38 | 2757 | 2766 | NCPISAKLER |
| 1199.6896 | 1199.6674 | −0.0222 | −19 | 3758 | 3767 | AFSIDIIRHK |
| 1257.6797 | 1257.6525 | −0.0272 | −22 | 1506 | 1516 | QISEQLNALNK |
| 1257.6797 | 1257.6525 | −0.0272 | −22 | 1506 | 1516 | QISEQLNALNK |
| 1261.694 | 1261.6499 | −0.0441 | −35 | 380 | 389 | LLEVWIEFGR |
| 1287.6791 | 1287.6593 | −0.0198 | −15 | 4662 | 4672 | EKTLLPEDSQK |
| 1320.7271 | 1320.6016 | −0.1255 | −95 | 1870 | 1881 | GDLRFVTISGQK |
| 1406.7386 | 1406.6833 | −0.0553 | −39 | 4647 | 4658 | QPVYDTTIRTGR |
| 1406.7386 | 1406.6833 | −0.0553 | −39 | 4647 | 4658 | QPVYDTTIRTGR |
| 1413.7809 | 1413.8057 | 0.0248 | 18 | 3156 | 3167 | ARQEQLELTLGR |
| 1420.7213 | 1420.6881 | −0.0332 | −23 | 2940 | 2951 | TGSLEEMTQRLR |
| 1425.7156 | 1425.8075 | 0.0919 | 64 | 869 | 880 | NTISVKAVCDYR |
| 1428.7693 | 1428.7153 | −0.054 | −38 | 5052 | 5063 | LNDALDRLEELK |
| 1465.7281 | 1465.7726 | 0.0445 | 30 | 4428 | 4439 | EETYNQLLDKGR |
| 1465.7316 | 1465.7726 | 0.041 | 28 | 4440 | 4453 | LMLLSRDDSGS |
| | | | | | | GSK |
| 1487.7952 | 1487.7654 | −0.0298 | −20 | 3565 | 3577 | QTTGEEVLLIQ |
| | | | | | | EK |
| 1502.873 | 1502.8582 | −0.0148 | −10 | 380 | 391 | LLEVWIEFGRIK |
| 1532.6785 | 1532.7728 | 0.0943 | 62 | 3891 | 3903 | ELNPEEGEMV |
| | | | | | | EEK |
| 1713.8728 | 1713.8539 | −0.0189 | −11 | 3123 | 3137 | HMLEEEGTLDL |
| | | | | | | LGLK |
| 1727.9149 | 1727.8947 | −0.0202 | −12 | 2151 | 2165 | KLLPQAEMFEH |
| | | | | | | LSGK |
| 1794.9636 | 1794.8103 | −0.1533 | −85 | 5106 | 5121 | QEFIDGILASKF |
| | | | | | | PTTK |
| 1838.8412 | 1838.927 | 0.0858 | 47 | 4960 | 4974 | ALIAEHQTFME |
| | | | | | | EMTR |
| 2186.155 | 2185.9851 | −0.1699 | −78 | 1958 | 1978 | LLSDTVASDPG |
| | | | | | | VLQEQL A |
| | | | | | | TTK |
| 2202.1799 | 2201.9719 | −0.208 | −94 | 2864 | 2882 | MSELRVTLDPV |
| | | | | | | QLESSLLR |
| 2233.1135 | 2233.0076 | −0.1059 | −47 | 2462 | 2481 | EALAGLLVTYP |
| | | | | | | NSQEAE N |
| | | | | | | WK |
| 2233.1135 | 2233.2017 | 0.0882 | 39 | 2462 | 2481 | EALAGLLVTYP |
| | | | | | | NSQEAE N |
| | | | | | | WK |
| 2299.0217 | 2299.144 | 0.1223 | 53 | 3068 | 3088 | EMFSQLADLD |
| | | | | | | DELDGM |

IPI00982053

[0675] Peptide Information

Tax_Id = 9606 Gene_Symbol = TSSK6 Conserved hypothetical protein
G AIGR

| | | | | Start | End | |
|---|---|---|---|---|---|---|
| Calc. Mass | Obsrv. Mass | ±da | ±ppm | Seq. | Seq. | Sequence |
| 856.4999 | 856.5223 | 0.0224 | 26 | 89 | 97 | AAQIAGAVR |
| 879.4907 | 879.4153 | −0.0754 | −86 | 55 | 62 | ATPAHRAR |
| 880.3876 | 880.4396 | 0.052 | 59 | 267 | 273 | GNMRSCR |
| 896.3825 | 896.4399 | 0.0574 | 64 | 267 | 273 | GNMRSCR |
| 912.4574 | 912.4597 | 0.0023 | 3 | 125 | 132 | LTDFGFGR |
| 1187.6136 | 1187.6656 | 0.052 | 44 | 271 | 279 | SCRVLLHMR |
| 1187.6136 | 1187.6656 | 0.052 | 44 | 271 | 279 | SCRVLLHMR |
| 1332.6768 | 1332.6146 | −0.0622 | −47 | 26 | 40 | GHQGGGPAAS |
| | | | | | | APGLR |
| 1413.771 | 1413.8057 | 0.0347 | 25 | 148 | 160 | GAPGHPLRPQ |
| | | | | | | EVR |
| 1487.7272 | 1487.7654 | 0.0382 | 26 | 111 | 122 | CENVLLSPDERR |
| 2299.2095 | 2299.144 | −0.0655 | −28 | 240 | 260 | LEAGWFQPFL |
| | | | | | | QPRALGQ |
| | | | | | | GGAR |

IPI01018834
IPI00478226

[0676] Protein Group

Tax_Id = 9606 Gene_Symbol = MACF1
Uncharacterized protein
Tax_Id = 9606 Gene_Symbol = MACF1 Isoform 5 of
Microtubule-actin cross-linking factor 1, isoforms
1/2/3/5

[0677] Peptide Information

| | | | | Start | End | |
|---|---|---|---|---|---|---|
| Calc. Mass | Obsrv. Mass | ±da | ±ppm | Seq. | Seq. | Sequence |
| 870.5229 | 870.5385 | 0.0156 | 18 | 3606 | 3613 | LMALGPIR |
| 870.5229 | 870.5385 | 0.0156 | 18 | 3606 | 3613 | LMALGPIR |
| 879.4935 | 879.4153 | −0.0782 | −89 | 1874 | 1881 | FVTISGQK |
| 880.441 | 880.4396 | −0.0014 | −2 | 2240 | 2246 | DFTELQK |
| 928.4669 | 928.4629 | −0.004 | −4 | 3522 | 3528 | KEVMEHR |
| 1021.5499 | 1021.5333 | −0.0166 | −16 | 2530 | 2537 | QQVQFMLK |
| 1021.5499 | 1021.5333 | −0.0166 | −16 | 2530 | 2537 | QQVQFMLK |
| 1106.5034 | 1106.5583 | 0.0549 | 50 | 1018 | 1026 | LEEEVEACK |
| 1170.6841 | 1170.6443 | −0.0398 | −34 | 3291 | 3300 | VVKAQIQEQK |
| 1187.6201 | 1187.6656 | 0.0455 | 38 | 2736 | 2745 | NCPISAKLER |
| 1187.6201 | 1187.6656 | 0.0455 | 38 | 2736 | 2745 | NCPISAKLER |
| 1199.6896 | 1199.6674 | −0.0222 | −19 | 3628 | 3637 | AFSIDIIRHK |
| 1257.6797 | 1257.6525 | −0.0272 | −22 | 1506 | 1516 | QISEQLNALNK |
| 1257.6797 | 1257.6525 | −0.0272 | −22 | 1506 | 1516 | QISEQLNA |
| | | | | | | LNK |
| 1261.694 | 1261.6499 | −0.0441 | −35 | 380 | 389 | LLEVWIEF |
| | | | | | | GR |
| 1287.6791 | 1287.6593 | −0.0198 | −15 | 4532 | 4542 | EKTLLPED |
| | | | | | | SQK |
| 1320.7271 | 1320.6016 | −0.1255 | −95 | 1870 | 1881 | GDLRFVTI |
| | | | | | | SGQK |
| 1406.7386 | 1406.6833 | −0.0553 | −39 | 4517 | 4528 | QPVYDTTI |
| | | | | | | RTGR |
| 1406.7386 | 1406.6833 | −0.0553 | −39 | 4517 | 4528 | QPVYDTTI |
| | | | | | | RTGR |
| 1413.7809 | 1413.8057 | 0.0248 | 18 | 3135 | 3146 | ARQEQLE |
| | | | | | | LTLGR |
| 1420.7213 | 1420.6881 | −0.0332 | −23 | 2919 | 2930 | TGSLEEMTQRLR |
| 1425.7156 | 1425.8075 | 0.0919 | 64 | 869 | 880 | NTISVKAVCDYR |
| 1428.7693 | 1428.7153 | −0.054 | −38 | 4922 | 4933 | LNDALDRLEELK |
| 1465.7281 | 1465.7726 | 0.0445 | 30 | 4298 | 4309 | EETYNQLLDKGR |
| 1465.7316 | 1465.7726 | 0.041 | 28 | 4310 | 4323 | LMLLSRDDSGS |
| | | | | | | GSK |
| 1487.7952 | 1487.7654 | −0.0298 | −20 | 3435 | 3447 | QTTGEEVLLIQ |
| | | | | | | EK |
| 1502.873 | 1502.8582 | −0.0148 | −10 | 380 | 391 | LLEVWIEFGRIK |
| 1532.6785 | 1532.7728 | 0.0943 | 62 | 3761 | 3773 | ELNPEEGEMV |
| | | | | | | EEK |
| 1713.8728 | 1713.8539 | −0.0189 | −11 | 3102 | 3116 | HMLEEEGTLDL |
| | | | | | | LGLK |
| 1727.9149 | 1727.8947 | −0.0202 | −12 | 2151 | 2165 | KLLPQAEMFEH |
| | | | | | | LSGK |
| 1794.9636 | 1794.8103 | −0.1533 | −85 | 4976 | 4991 | QEFIDGILASKF |
| | | | | | | PTTK |
| 1838.8412 | 1838.927 | 0.0858 | 47 | 4830 | 4844 | ALIAEHQTFME |
| | | | | | | EMTR |
| 2186.155 | 2185.9851 | −0.1699 | −78 | 1958 | 1978 | LLSDTVASDPG |
| | | | | | | VLQEQL A |
| | | | | | | TTK |
| 2202.1799 | 2201.9719 | −0.208 | −94 | 2843 | 2861 | MSELRVTLDPV |
| | | | | | | QLESSLLR |
| 2233.1135 | 2233.0076 | −0.1059 | −47 | 2441 | 2460 | EALAGLLVTYP |
| | | | | | | NSQEAE N |
| | | | | | | WK |
| 2233.1135 | 2233.2017 | 0.0882 | 39 | 2441 | 2460 | EALAGLLVTYP |
| | | | | | | NSQEAE N |
| | | | | | | WK |
| 2299.0217 | 2299.144 | 0.1223 | 53 | 3047 | 3067 | EMFSQLADLDD |
| | | | | | | ELDGM G |
| | | | | | | AIGR |

IPI01018940

[0678] Peptide Information

Tax_Id = 9606 Gene_Symbol = MACF1 Isoform 3 of
Microtubule-actin cross-linking factor 1, isoforms
1/2/3/5

| | | | | Start | End | |
|---|---|---|---|---|---|---|
| Calc. Mass | Obsrv. Mass | ±da | ±ppm | Seq. | Seq. | Sequence |
| 870.5229 | 870.5385 | 0.0156 | 18 | 3680 | 3687 | LMALGPIR |
| 870.5229 | 870.5385 | 0.0156 | 18 | 3680 | 3687 | LMALGPIR |
| 879.4935 | 879.4153 | −0.0782 | −89 | 1839 | 1846 | FVTISGQK |
| 880.441 | 880.4396 | −0.0014 | −2 | 2205 | 2211 | DFTELQK |
| 910.4265 | 910.4448 | 0.0183 | 20 | 3420 | 3426 | YSEIQDR |
| 910.4265 | 910.4448 | 0.0183 | 20 | 3420 | 3426 | YSEIQDR |
| 928.4669 | 928.4629 | −0.004 | −4 | 3596 | 3602 | KEVMEHR |
| 1021.5499 | 1021.5333 | −0.0166 | −16 | 2495 | 2502 | QQVQFMLK |
| 1021.5499 | 1021.5333 | −0.0166 | −16 | 2495 | 2502 | QQVQFM |
| | | | | | | LK |
| 1106.5034 | 1106.5583 | 0.0549 | 50 | 983 | 991 | LEEEVE |
| | | | | | | ACK |
| 1170.6841 | 1170.6443 | −0.0398 | −34 | 3256 | 3265 | VVKAQI |
| | | | | | | QEQK |
| 1187.6201 | 1187.6656 | 0.0455 | 38 | 2701 | 2710 | NCPISAK |
| | | | | | | LER |
| 1187.6201 | 1187.6656 | 0.0455 | 38 | 2701 | 2710 | NCPISAKLER |
| 1199.6896 | 1199.6674 | −0.0222 | −19 | 3702 | 3711 | AFSIDIIRHK |
| 1257.6797 | 1257.6525 | −0.0272 | −22 | 1471 | 1481 | QISEQLNALNK |
| 1257.6797 | 1257.6525 | −0.0272 | −22 | 1471 | 1481 | QISEQLNALNK |
| 1261.694 | 1261.6499 | −0.0441 | −35 | 345 | 354 | LLEVWIEFGR |
| 1287.6791 | 1287.6593 | −0.0198 | −15 | 4606 | 4616 | EKTLLPEDSQK |
| 1320.7271 | 1320.6016 | −0.1255 | −95 | 1835 | 1846 | GDLRFVTISGQK |
| 1406.7386 | 1406.6833 | −0.0553 | −39 | 4591 | 4602 | QPVYDTTIRTGR |
| 1406.7386 | 1406.6833 | −0.0553 | −39 | 4591 | 4602 | QPVYDTTIRTGR |
| 1413.7809 | 1413.8057 | 0.0248 | 18 | 3100 | 3111 | ARQEQLELTLGR |
| 1420.7213 | 1420.6881 | −0.0332 | −23 | 2884 | 2895 | TGSLEEMTQRLR |
| 1425.7156 | 1425.8075 | 0.0919 | 64 | 834 | 845 | NTISVKAVCDYR |
| 1428.7693 | 1428.7153 | −0.054 | −38 | 4996 | 5007 | LNDALDRLEELK |
| 1465.7281 | 1465.7726 | 0.0445 | 30 | 4372 | 4383 | EETYNQLLDKGR |
| 1465.7316 | 1465.7726 | 0.041 | 28 | 4384 | 4397 | LMLLSRDDSGS |
| | | | | | | GSK |
| 1487.7952 | 1487.7654 | −0.0298 | −20 | 3509 | 3521 | QTTGEEVLLIQ |
| | | | | | | EK |
| 1502.873 | 1502.8582 | −0.0148 | −10 | 345 | 356 | LLEVWIEFGRIK |
| 1532.6785 | 1532.7728 | 0.0943 | 62 | 3835 | 3847 | ELNPEEGEMV |
| | | | | | | EEK |
| 1713.8728 | 1713.8539 | −0.0189 | −11 | 3067 | 3081 | HMLEEEGTLDL |
| | | | | | | LGLK |
| 1727.9149 | 1727.8947 | −0.0202 | −12 | 2116 | 2130 | KLLPQAEMFEH |
| | | | | | | LSGK |
| 1794.9636 | 1794.8103 | −0.1533 | −85 | 5050 | 5065 | QEFIDGILASKF |
| | | | | | | PTTK |
| 1838.8412 | 1838.927 | 0.0858 | 47 | 4904 | 4918 | ALIAEHQTFME |
| | | | | | | EMTR |
| 2186.155 | 2185.9851 | −0.1699 | −78 | 1923 | 1943 | LLSDTVASDPG |
| | | | | | | VLQEQL A |
| | | | | | | TTK |
| 2202.1799 | 2201.9719 | −0.208 | −94 | 2808 | 2826 | MSELRVTLDPV |
| | | | | | | QLESSLLR |
| 2233.1135 | 2233.0076 | −0.1059 | −47 | 2406 | 2425 | EALAGLLVTYP |
| | | | | | | NSQEAE N |
| | | | | | | WK |
| 2233.1135 | 2233.2017 | 0.0882 | 39 | 2406 | 2425 | EALAGLLVTYP |
| | | | | | | NSQEAE N |
| | | | | | | WK |
| 2299.0217 | 2299.144 | 0.1223 | 53 | 3012 | 3032 | EMFSQLADLDD |
| | | | | | | ELDGM G |
| | | | | | | AIGR |

IPI00152653

[0679] Peptide Information

Tax_Id = 9606 Gene_Symbol = DNAH5 Dynein heavy
chain 5, axonemal

| | | | | Start | End | |
|---|---|---|---|---|---|---|
| Calc. Mass | Obsrv. Mass | ±da | ±ppm | Seq. | Seq. | Sequence |
| 856.525 | 856.5223 | −0.0027 | −3 | 1408 | 1414 | QLNLLQK |
| 879.4683 | 879.4153 | −0.053 | −60 | 1654 | 1660 | RFSNI |
| | | | | | | DK |
| 880.4774 | 880.4396 | −0.0378 | −43 | 1204 | 1211 | FALTAETK |
| 896.4407 | 896.4399 | −0.0008 | −1 | 747 | 753 | RNFSNMK |
| 910.488 | 910.4448 | −0.0432 | −47 | 1702 | 1709 | SLTGYLEK |
| 910.488 | 910.4448 | −0.0432 | −47 | 1702 | 1709 | SLTGYLEK |
| 912.4573 | 912.4597 | 0.0024 | 3 | 285 | 291 | AELEHWK |
| 928.5403 | 928.4629 | −0.0774 | −83 | 4440 | 4446 | IPAWWKK |
| 985.5941 | 985.582 | −0.0121 | −12 | 2503 | 2509 | RLELWLR |
| 985.5941 | 985.582 | −0.0121 | −12 | 2503 | 2509 | RLELWLR |
| 1005.5363 | 1005.6074 | 0.0711 | 71 | 820 | 827 | VNDLIEFR |
| 1021.4805 | 1021.5333 | 0.0528 | 52 | 2103 | 2111 | SVAMMVPDR |
| 1021.4805 | 1021.5333 | 0.0528 | 52 | 2103 | 2111 | SVAMMVPDR |
| 1106.5411 | 1106.5583 | 0.0172 | 16 | 326 | 333 | TWREMDIR |
| 1187.6816 | 1187.6656 | −0.016 | −13 | 4549 | 4558 | NMKLIESKPK |
| 1187.6816 | 1187.6656 | −0.016 | −13 | 4549 | 4558 | NMKLIESKPK |
| 1199.6995 | 1199.6674 | −0.0321 | −27 | 2585 | 2596 | AVLLIGEQGTAK |
| 1257.7566 | 1257.6525 | −0.1041 | −83 | 167 | 177 | LLSDIFIPALR |
| 1257.7566 | 1257.6525 | −0.1041 | −83 | 167 | 177 | LLSDIFIPALR |
| 1261.6212 | 1261.6499 | 0.0287 | 23 | 1299 | 1308 | VDTLHYAWEK |
| 1271.6553 | 1271.6659 | 0.0106 | 8 | 3711 | 3721 | TSIIDFTVTMK |
| 1332.7369 | 1332.6146 | −0.1223 | −92 | 3210 | 3222 | LKEASESVAAL |
| | | | | | | SK |
| 1413.8577 | 1413.8057 | −0.052 | −37 | 166 | 177 | RLLSDIFIPALR |
| 1428.7482 | 1428.7153 | −0.0329 | −23 | 3698 | 3710 | LPNPAYTPEIS |
| | | | | | | AR |
| 1502.9153 | 1502.8582 | −0.0571 | −38 | 1119 | 1132 | LVSVLSTIINST |
| | | | | | | KK |
| 1794.7972 | 1794.8103 | 0.0131 | 7 | 748 | 761 | NFSNMKMMLA |
| | | | | | | EYQR |
| 1838.8668 | 1838.927 | 0.0602 | 33 | 3501 | 3515 | ERWTEQSQEF |
| | | | | | | AAQTK |
| 2266.176 | 2266.0767 | −0.0993 | −44 | 957 | 975 | ELLSHFNHQN |
| | | | | | | MDALLKV TR |

IPI00966721

[0680] Peptide Information

Tax_Id = 9606 Gene_Symbol = C5orf28
Uncharacterized protein

| | Obsrv. | | | Start | End | |
|---|---|---|---|---|---|---|
| Calc. Mass | Mass | ±da | ±ppm | Seq. | Seq. | Sequence |
| 870.5043 | 870.5385 | 0.0342 | 39 | 2 | 9 | EAALTLPR |
| 870.5043 | 870.5385 | 0.0342 | 39 | 2 | 9 | EAALTLPR |

IPI00853050
Tax_Id = 9606 Gene_Symbol = MB21D1
Uncharacterized protein

[0681] Peptide Information

| | | | | Start | End | |
|---|---|---|---|---|---|---|
| Calc. Mass | Obsrv. Mass | ±da | ±ppm | Seq. | Seq. | Sequence |
| 924.4897 | 924.4626 | −0.0271 | −29 | 385 | 392 | EILNNHGK |
| 985.5425 | 985.582 | 0.0395 | 40 | 157 | 166 | DAAPGASKLR |
| 985.5425 | 985.582 | 0.0395 | 40 | 157 | 166 | DAAPGASKLR |
| 1021.6153 | 1021.5333 | −0.082 | −80 | 188 | 196 | GVVDHLLLR |
| 1021.6153 | 1021.5333 | −0.082 | −80 | 188 | 196 | GVVDHLLLR |
| 1254.6161 | 1254.6615 | 0.0454 | 36 | 2 | 11 | QPWHGKAMQR |
| 1257.5422 | 1257.6525 | 0.1103 | 88 | 496 | 505 | NNEFPVFDEF |
| 1257.5422 | 1257.6525 | 0.1103 | 88 | 496 | 505 | NNEFPVFDEF |
| 1271.7206 | 1271.6659 | −0.0547 | −43 | 303 | 315 | GGSPAVTLLISEK |
| 1287.6652 | 1287.6593 | −0.0059 | −5 | 12 | 25 | ASEAGATAPKA |
| | | | | | | SAR |
| 1413.6719 | 1413.8057 | 0.1338 | 95 | 220 | 231 | ISAPNEFDVMFK |
| 1479.7472 | 1479.7794 | 0.0322 | 22 | 174 | 187 | LSRDDISTAAG |
| | | | | | | MVK |

IPI00854821

[0682] Peptide Information

Tax_Id = 9606 Gene_Symbol = DLG5 Isoform 4 of
Disks
large homolog 5

| | | | | Start | End | |
|---|---|---|---|---|---|---|
| Calc. Mass | Obsrv. Mass | ±da | ±ppm | Seq. | Seq. | Sequence |
| 879.3876 | 879.4153 | 0.0277 | 31 | 132 | 138 | DDVDMLR |
| 880.4523 | 880.4396 | −0.0127 | −14 | 206 | 212 | DYDALRK |
| 924.4421 | 924.4626 | 0.0205 | 22 | 1766 | 1772 | LEQEYSR |
| 985.5537 | 985.582 | 0.0283 | 29 | 139 | 146 | RENGQLLR |
| 985.5537 | 985.582 | 0.0283 | 29 | 139 | 146 | RENGQLLR |
| 1187.5917 | 1187.6656 | 0.0739 | 62 | 712 | 722 | AHGPEVQAHNK |
| 1187.5917 | 1187.6656 | 0.0739 | 62 | 712 | 722 | AHGPEVQAHNK |
| 1261.6205 | 1261.6499 | 0.0294 | 23 | 358 | 368 | KAANEEMEALR |
| 1406.7526 | 1406.6833 | −0.0693 | −49 | 1495 | 1506 | LADVEQELSFKK |
| 1406.7526 | 1406.6833 | −0.0693 | −49 | 1495 | 1506 | LADVEQELSFKK |
| 1420.7026 | 1420.6881 | −0.0145 | −10 | 1562 | 1575 | DDNSATKTLSA |
| | | | | | | AAR |
| 1487.8315 | 1487.7654 | −0.0661 | −44 | 339 | 351 | LQTEVELAESKLK |
| 1502.7632 | 1502.8582 | 0.095 | 63 | 359 | 371 | AANEEMEALRQ |
| | | | | | | IK |
| 1727.9539 | 1727.8947 | −0.0592 | −34 | 1243 | 1259 | VQKGSEPLGISI |
| | | | | | | VSGEK |

IPI00927275

[0683] Peptide Information

Tax_Id = 9606 Gene_Symbol = LMCD1
Uncharacterized protein

| Calc. | Obsrv. | | | Start | End | |
|---|---|---|---|---|---|---|
| Mass | Mass | ±da | ±ppm | Seq. | Seq. | Sequence |
| 870.5043 | 870.5385 | 0.0342 | 39 | 7 | 14 | DLNPGVKK |
| 870.5043 | 870.5385 | 0.0342 | 39 | 7 | 14 | DLNPGVKK |
| 1106.5623 | 1106.5583 | −0.004 | −4 | 15 | 24 | MSLGQ |
| | | | | | | LQSAR |
| 1420.6063 | 1420.6881 | 0.0818 | 58 | 33 | 44 | GTCSGF |
| | | | | | | EPHSWR |
| 2265.9951 | 2266.0767 | 0.0816 | 36 | 25 | 44 | GVACLGC |
| | | | | | | KGTC |
| | | | | | | SGFEPH |

5no matched protein found

| 156/G7 | Instr./Gel Origin |
|---|---|
| [1] Sample Project | |
| 20111201 | Instrument Sample |

| | | |
|---|---|---|
| Accession No. | Protein Name | Name |

| | |
|---|---|
| IPI00160622 | Tax_Id = 9606 Gene_Symbol = |
| | CEP250 Isoform 1 of |
| | Centrosome-associated protein |
| | CEP250 |

[0684] KH25 (SEQ ID NO. 25) Peptide Information

| | | | | Start | End | |
|---|---|---|---|---|---|---|
| Calc. Mass | Obsrv. Mass | ±da | ±ppm | Seq. | Seq. | Sequence |
| 985.5537 | 985.5696 | 0.0159 | 16 | 399 | 406 | RQAVQDLR |
| 985.5789 | 985.5696 | −0.0093 | −9 | 127 | 135 | ADWNKALR |
| 1065.5067 | 1065.5122 | 0.0055 | 5 | 883 | 890 | EKMELEMR |
| 1232.6117 | 1232.6262 | 0.0145 | 12 | 1390 | 1399 | LKNEEVESER |
| 1235.5837 | 1235.5809 | −0.0028 | −2 | 68 | 76 | SWCQELEKR |
| 1257.691 | 1257.6628 | −0.0282 | −22 | 1667 | 1676 | IQVLEDQRTR |
| 1257.705 | 1257.6628 | −0.0422 | −34 | 601 | 612 | LSALNEALALDK |
| 1323.728 | 1323.6946 | −0.0334 | −25 | 172 | 182 | GEHGRLLSLWR |
| 1425.7081 | 1425.8451 | 0.137 | 96 | 2371 | 2382 | QDYITRSAQTSR |
| 1425.7081 | 1425.8451 | 0.137 | 96 | 2371 | 2382 | QDYITRSAQTSR |
| 1487.77 | 1487.8041 | 0.0341 | 23 | 753 | 766 | QDLAEQLQGLSS |
| | | | | | | AK |
| 1497.8384 | 1497.7552 | −0.0832 | −56 | 1881 | 1893 | RVQALEEVLGDLR |
| 1532.785 | 1532.8186 | 0.0336 | 22 | 1698 | 1709 | ELTTQRQLMQER |
| 1579.7819 | 1579.8885 | 0.1066 | 67 | 522 | 534 | ERLQEMLMGLEAK |
| 1708.9089 | 1708.9078 | −0.0011 | −1 | 2292 | 2305 | HNVQLRSTLEQV |
| | | | | | | ER |
| | 1708.9078 | | | | | |
| 1713.8767 | 1713.9175 | 0.0408 | 24 | 492 | 507 | VNVELQLQGDSA |
| | | | | | | QGQK |

| | |
|---|---|
| IPI00292871 | Tax_Id = 9606 Gene_Symbol = CEP250 Isoform 2 of |
| | Centrosome-associated protein CEP250 |

[0685] Peptide Information

| | Obsrv. | | | Start | End | |
|---|---|---|---|---|---|---|
| Calc. Mass | Mass | ±da | ±ppm | Seq. | Seq. | Sequence |
| 985.5537 | 985.5696 | 0.0159 | 16 | 399 | 406 | RQAVQDLR |
| 985.5789 | 985.5696 | −0.0093 | −9 | 127 | 135 | ADWNKALR |
| 1232.6117 | 1232.6262 | 0.0145 | 12 | 1334 | 1343 | LKNEEVESER |
| 1235.5837 | 1235.5809 | −0.0028 | −2 | 68 | 76 | SWCQELEKR |
| 1257.691 | 1257.6628 | −0.0282 | −22 | 1611 | 1620 | IQVLEDQRTR |
| 1257.705 | 1257.6628 | −0.0422 | −34 | 601 | 612 | LSALNEALALDK |
| 1323.728 | 1323.6946 | −0.0334 | −25 | 172 | 182 | GEHGRLLSLWR |
| 1425.7081 | 1425.8451 | 0.137 | 96 | 2315 | 2326 | QDYITRSAQTSR |
| 1425.7081 | 1425.8451 | 0.137 | 96 | 2315 | 2326 | QDYITRSAQTSR |
| 1487.77 | 1487.8041 | 0.0341 | 23 | 753 | 766 | QDLAEQLQGL |
| | | | | | | SSAK |
| 1497.8384 | 1497.7552 | −0.0832 | −56 | 1825 | 1837 | RVQALEEVLG |
| | | | | | | DLR |
| 1532.785 | 1532.8186 | 0.0336 | 22 | 1642 | 1653 | ELTTQRQLMQ |
| | | | | | | ER |
| 1579.7819 | 1579.8885 | 0.1066 | 67 | 522 | 534 | ERLQEMLMGL |
| | | | | | | EAK |
| 1708.9089 | 1708.9078 | −0.0011 | −1 | 2236 | 2249 | HNVQLRSTLE |
| | | | | | | QVER |
| 1713.8767 | 1713.9175 | 0.0408 | 24 | 492 | 507 | VNVELQLQGD |
| | | | | | | SAQGQK |

| | |
|---|---|
| IPI00945119 | Tax_Id = 9606 Gene_Symbol = CEP250 |
| | Uncharacterized protein |

[0686] Peptide Information

| | | | | Start | End | |
|---|---|---|---|---|---|---|
| Calc. Mass | Obsrv. Mass | ±da | ±ppm | Seq. | Seq. | Sequence |
| 985.5537 | 985.5696 | 0.0159 | 16 | 399 | 406 | RQAVQDLR |
| 985.5789 | 985.5696 | −0.0093 | −9 | 127 | 135 | ADVVNKALR |
| 1235.5837 | 1235.5809 | −0.0028 | −2 | 68 | 76 | SWCQELEKR |
| 1323.728 | 1323.6946 | −0.0334 | −25 | 172 | 182 | GEHGRLLSLWR |
| 1713.8767 | 1713.9175 | 0.0408 | 24 | 492 | 507 | VNVELQLQGDSA |
| | | | | | | QGQK |

| | |
|---|---|
| IPI01012199 | Tax_Id = 9606 Gene_Symbol = MACF1 Uncharacterized |
| | protein |

[0687] Protein Group

| | |
|---|---|
| IPI00256861 | Tax_Id = 9606 Gene_Symbol = MACF1 Isoform 2 of |
| | Microtubule-actin cross-linking factor 1, isoforms 1/2/3/5 |

[0688] Peptide Information

| | | | | Start | End | |
|---|---|---|---|---|---|---|
| Calc. Mass | Obsrv. Mass | ±da | ±ppm | Seq. | Seq. | Sequence |
| 870.5229 | 870.5196 | −0.0033 | −4 | 3736 | 3743 | LMALGPIR |
| 880.441 | 880.4194 | −0.0216 | −25 | 2240 | 2246 | DFTELQK |
| 910.4265 | 910.4317 | 0.0052 | 6 | 3476 | 3482 | YSEIQDR |
| 910.4265 | 910.4317 | 0.0052 | 6 | 3476 | 3482 | YSEIQDR |
| 928.4669 | 928.4491 | −0.0178 | −19 | 3652 | 3658 | KEVMEHR |
| 1021.5499 | 1021.5277 | −0.0222 | −22 | 2551 | 2558 | QQVQFMLK |
| 1021.5499 | 1021.5277 | −0.0222 | −22 | 2551 | 2558 | QQVQFMLK |
| 1170.5902 | 1170.6512 | 0.061 | 52 | 2820 | 2828 | NHWEELSKK |
| 1170.6841 | 1170.6512 | −0.0329 | −28 | 3312 | 3321 | WKAQIQEQK |
| 1187.6201 | 1187.681 | 0.0609 | 51 | 2757 | 2766 | NCPISAKLER |
| 1187.6201 | 1187.681 | 0.0609 | 51 | 2757 | 2766 | NCPISAKLER |
| 1232.6117 | 1232.6262 | 0.0145 | 12 | 2659 | 2668 | QQLEETSEIR |
| 1235.6378 | 1235.5809 | −0.0569 | −46 | 1058 | 1066 | LRLEEYEQR |
| 1257.6797 | 1257.6628 | −0.0169 | −13 | 1506 | 1516 | QISEQLNALNK |
| 1257.6797 | 1257.6628 | −0.0169 | −13 | 1506 | 1516 | QISEQLNALNK |
| 1261.694 | 1261.6696 | −0.0244 | −19 | 380 | 389 | LLEVWIEFGR |
| 1320.7271 | 1320.6184 | −0.1087 | −82 | 1870 | 1881 | GDLRFVTISGQK |
| 1323.7896 | 1323.6946 | −0.095 | −72 | 3670 | 3680 | ALLELVPWR |
| | | | | | | AR |
| 1406.7386 | 1406.7107 | −0.0279 | −20 | 4647 | 4658 | QPVYDTTIR |
| | | | | | | TGR |
| 1406.7386 | 1406.7107 | −0.0279 | −20 | 4647 | 4658 | QPVYDTTIR |
| | | | | | | TGR |
| 1413.7809 | 1413.8478 | 0.0669 | 47 | 3156 | 3167 | ARQEQLELT |
| | | | | | | LGR |
| 1420.7213 | 1420.7368 | 0.0155 | 11 | 2940 | 2951 | TGSLEEMTQ |
| | | | | | | RLR |
| 1425.7156 | 1425.8451 | 0.1295 | 91 | 869 | 880 | NTISVKAVC |
| | | | | | | DYR |
| 1425.7156 | 1425.8451 | 0.1295 | 91 | 869 | 880 | NTISVKAVC |
| | | | | | | DYR |
| 1428.7693 | 1428.7944 | 0.0251 | 18 | 5052 | 5063 | LNDALDRLE |
| | | | | | | ELK |
| 1465.7281 | 1465.8011 | 0.073 | 50 | 4428 | 4439 | EETYNQLLD |
| | | | | | | KGR |
| 1465.7316 | 1465.8011 | 0.0695 | 47 | 4440 | 4453 | LMLLSRDDS |
| | | | | | | GSGSK |
| 1487.7952 | 1487.8041 | 0.0089 | 6 | 3565 | 3577 | QTTGEEVLLI |
| | | | | | | QEK |
| 1502.873 | 1502.8989 | 0.0259 | 17 | 380 | 391 | LLEVWIEFG |
| | | | | | | RIK |
| 1532.6785 | 1532.8186 | 0.1401 | 91 | 3891 | 3903 | ELNPEEGE |
| | | | | | | MVEEK |
| 1708.8389 | 1708.9078 | 0.0689 | 40 | 3681 | 3695 | EGLDKLVSDAN |
| | | | | | | EQYK |
| 1713.8728 | 1713.9175 | 0.0447 | 26 | 3123 | 3137 | HMLEEEGTLDL |
| | | | | | | LGLK |
| 1727.9149 | 1727.9177 | 0.0028 | 2 | 2151 | 2165 | KLLPQAEMFEH |
| | | | | | | LSGK |
| 1950.9412 | 1951.001 | 0.0598 | 31 | 4960 | 4975 | ALIAEHQTFME |
| | | | | | | EMTRK |
| 1966.9362 | 1966.9954 | 0.0592 | 30 | 4960 | 4975 | ALIAEHQTFME |
| | | | | | | EMTRK |
| 2185.0693 | 2185.1575 | 0.0882 | 40 | 3885 | 3903 | IGPQLKELNPE |
| | | | | | | EGEMVEEK |
| 2186.155 | 2186.0022 | −0.1528 | −70 | 1958 | 1978 | LLSDTVASDPG |
| | | | | | | VLQEQLA |
| | | | | | | TTK |
| 2186.1851 | 2186.1931 | 0.008 | 4 | 2864 | 2882 | MSELRVTLDPV |
| | | | | | | QLESSLLR |
| 2200.0632 | 2200.0994 | 0.0362 | 16 | 4015 | 4031 | EIQDKLDQMVF |
| | | | | | | FWEDIK |
| 2202.1799 | 2202.2275 | 0.0476 | 22 | 2864 | 2882 | MSELRVTLDPV |
| | | | | | | QLESSLLR |
| 2212.2183 | 2212.3137 | 0.0954 | 43 | 3558 | 3577 | NGQALLKQTTG |
| | | | | | | EEVLLIQ |
| | | | | | | EK |

| | |
|---|---|
| IPI01018940 | Tax_Id = 9606 Gene_Symbol = MACF1 Isoform 3 of |
| | Microtubule-actin cross-linking factor 1, |
| | isoforms 1/2/3/5 |

[0689] Peptide Information

| | | | | Start | End | |
|---|---|---|---|---|---|---|
| Calc. Mass | Obsrv. Mass | ±da | ±ppm | Seq. | Seq. | Sequence |
| 870.5229 | 870.5196 | −0.0033 | −4 | 3680 | 3687 | LMALGPIR |
| 880.441 | 880.4194 | −0.0216 | −25 | 2205 | 2211 | DFTELQK |
| 910.4265 | 910.4317 | 0.0052 | 6 | 3420 | 3426 | YSEIQDR |
| 910.4265 | 910.4317 | 0.0052 | 6 | 3420 | 3426 | YSEIQDR |
| 928.4669 | 928.4491 | −0.0178 | −19 | 3596 | 3602 | KEVMEHR |
| 1021.5499 | 1021.5277 | −0.0222 | −22 | 2495 | 2502 | QQVQFMLK |
| 1021.5499 | 1021.5277 | −0.0222 | −22 | 2495 | 2502 | QQVQFMLK |
| 1170.5902 | 1170.6512 | 0.061 | 52 | 2764 | 2772 | NHWEELSKK |
| 1170.6841 | 1170.6512 | −0.0329 | −28 | 3256 | 3265 | VVKAQIQEQK |
| 1187.6201 | 1187.681 | 0.0609 | 51 | 2701 | 2710 | NCPISAKL |
| | | | | | | ER |
| 1187.6201 | 1187.681 | 0.0609 | 51 | 2701 | 2710 | NCPISAKL |
| | | | | | | ER |
| 1232.6117 | 1232.6262 | 0.0145 | 12 | 2603 | 2612 | QQLEETS |
| | | | | | | EIR |
| 1235.6378 | 1235.5809 | −0.0569 | −46 | 1023 | 1031 | LRLEEYE |
| | | | | | | QR |
| 1257.6797 | 1257.6628 | −0.0169 | −13 | 1471 | 1481 | QISEQLNA |
| | | | | | | LNK |
| 1257.6797 | 1257.6628 | −0.0169 | −13 | 1471 | 1481 | QISEQLNA |
| | | | | | | LNK |
| 1261.694 | 1261.6696 | −0.0244 | −19 | 345 | 354 | LLEVWIEF |
| | | | | | | GR |
| 1320.7271 | 1320.6184 | −0.1087 | −82 | 1835 | 1846 | GDLRFVTI |
| | | | | | | SGQK |
| 1323.7896 | 1323.6946 | −0.095 | −72 | 3614 | 3624 | ALLELVP |
| | | | | | | WRAR |
| 1406.7386 | 1406.7107 | −0.0279 | −20 | 4591 | 4602 | QPVYDTTIRTGR |
| 1406.7386 | 1406.7107 | −0.0279 | −20 | 4591 | 4602 | QPVYDTTIRTGR |
| 1413.7809 | 1413.8478 | 0.0669 | 47 | 3100 | 3111 | ARQEQLELTLGR |
| 1420.7213 | 1420.7368 | 0.0155 | 11 | 2884 | 2895 | TGSLEEMTQRLR |
| 1425.7156 | 1425.8451 | 0.1295 | 91 | 834 | 845 | NTISVKAVCDYR |
| 1425.7156 | 1425.8451 | 0.1295 | 91 | 834 | 845 | NTISVKAVCDYR |
| 1428.7693 | 1428.7944 | 0.0251 | 18 | 4996 | 5007 | LNDALDRLEELK |
| 1465.7281 | 1465.8011 | 0.073 | 50 | 4372 | 4383 | EETYNQLLDKGR |
| 1465.7316 | 1465.8011 | 0.0695 | 47 | 4384 | 4397 | LMLLSRDDSGS |
| | | | | | | GSK |
| 1487.7952 | 1487.8041 | 0.0089 | 6 | 3509 | 3521 | QTTGEEVLLIQ |
| | | | | | | EK |
| 1502.873 | 1502.8989 | 0.0259 | 17 | 345 | 356 | LLEVWIEFGRIK |
| 1532.6785 | 1532.8186 | 0.1401 | 91 | 3835 | 3847 | ELNPEEGEMVE |
| | | | | | | EK |
| 1708.8389 | 1708.9078 | 0.0689 | 40 | 3625 | 3639 | EGLDKLVSDAN |
| | | | | | | EQYK |
| 1713.8728 | 1713.9175 | 0.0447 | 26 | 3067 | 3081 | HMLEEEGTLDL |
| | | | | | | LGLK |
| 1727.9149 | 1727.9177 | 0.0028 | 2 | 2116 | 2130 | KLLPQAEMFEH |
| | | | | | | LSGK |
| 1950.9412 | 1951.001 | 0.0598 | 31 | 4904 | 4919 | ALIAEHQTFME |
| | | | | | | EMTRK |
| 1966.9362 | 1966.9954 | 0.0592 | 30 | 4904 | 4919 | ALIAEHQTFME |
| | | | | | | EMTRK |
| 2185.0693 | 2185.1575 | 0.0882 | 40 | 3829 | 3847 | IGPQLKELNPE |
| | | | | | | EGEMVEEK |
| 2186.155 | 2186.0022 | −0.1528 | −70 | 1923 | 1943 | LLSDTVASDPG |
| | | | | | | VLQEQLA |
| | | | | | | TTK |
| 2186.1851 | 2186.1931 | 0.008 | 4 | 2808 | 2826 | MSELRVTLDPV |
| | | | | | | QLESSLLR |
| 2200.0632 | 2200.0994 | 0.0362 | 16 | 3959 | 3975 | EIQDKLDQMVF |
| | | | | | | FWEDIK |
| 2202.1799 | 2202.2275 | 0.0476 | 22 | 2808 | 2826 | MSELRVTLDPV |
| | | | | | | QLESSLLR |
| 2212.2183 | 2212.3137 | 0.0954 | 43 | 3502 | 3521 | NGQALLKQTTG |
| | | | | | | EEVLLIQ |
| | | | | | | EK |

| | |
|---|---|
| IPI01018834 | Tax_Id = 9606 Gene_Symbol = MACF1 Uncharacterized |
| | protein |

[0690] Protein Group

| | |
|---|---|
| IPI00478226 | Tax_Id = 9606 Gene_Symbol = MACF1 Isoform 5 of |
| | Microtubule-actin cross-linking factor 1, isoforms 1/2/3/5 |

[0691] Peptide Information

| | Obsrv. | | | Start | End | |
|---|---|---|---|---|---|---|
| Calc. Mass | Mass | ±da | ±ppm | Seq. | Seq. | Sequence |
| 870.5229 | 870.5196 | −0.0033 | −4 | 3606 | 3613 | LMALGPIR |
| 880.441 | 880.4194 | −0.0216 | −25 | 2240 | 2246 | DFTELQK |
| 928.4669 | 928.4491 | −0.0178 | −19 | 3522 | 3528 | KEVMEHR |
| 1021.5499 | 1021.5277 | −0.0222 | −22 | 2530 | 2537 | QQVQFMLK |
| 1021.5499 | 1021.5277 | −0.0222 | −22 | 2530 | 2537 | QQVQFMLK |
| 1170.5902 | 1170.6512 | 0.061 | 52 | 2799 | 2807 | NHWEELSKK |
| 1170.6841 | 1170.6512 | −0.0329 | −28 | 3291 | 3300 | VVKAQIQEQK |
| 1187.6201 | 1187.681 | 0.0609 | 51 | 2736 | 2745 | NCPISAKLER |
| 1187.6201 | 1187.681 | 0.0609 | 51 | 2736 | 2745 | NCPISAKLER |
| 1232.6117 | 1232.6262 | 0.0145 | 12 | 2638 | 2647 | QQLEETSEIR |
| 1235.6378 | 1235.5809 | −0.0569 | −46 | 1058 | 1066 | LRLEEYEQR |
| 1257.6797 | 1257.6628 | −0.0169 | −13 | 1506 | 1516 | QISEQLNALNK |
| 1257.6797 | 1257.6628 | −0.0169 | −13 | 1506 | 1516 | QISEQLNALNK |
| 1261.694 | 1261.6696 | −0.0244 | −19 | 380 | 389 | LLEVWIEFGR |
| 1320.7271 | 1320.6184 | −0.1087 | −82 | 1870 | 1881 | GDLRFVTISGQK |
| 1323.7896 | 1323.6946 | −0.095 | −72 | 3540 | 3550 | ALLELVPWRAR |
| 1406.7386 | 1406.7107 | −0.0279 | −20 | 4517 | 4528 | QPVYDTTIRTGR |
| 1406.7386 | 1406.7107 | −0.0279 | −20 | 4517 | 4528 | QPVYDTTIRTGR |
| 1413.7809 | 1413.8478 | 0.0669 | 47 | 3135 | 3146 | ARQEQLELTLGR |
| 1420.7213 | 1420.7368 | 0.0155 | 11 | 2919 | 2930 | TGSLEEMTQRLR |
| 1425.7156 | 1425.8451 | 0.1295 | 91 | 869 | 880 | NTISVKAVCDYR |
| 1425.7156 | 1425.8451 | 0.1295 | 91 | 869 | 880 | NTISVKAVCDYR |
| 1428.7693 | 1428.7944 | 0.0251 | 18 | 4922 | 4933 | LNDALDRLEELK |
| 1465.7281 | 1465.8011 | 0.073 | 50 | 4298 | 4309 | EETYNQLLDKGR |
| 1465.7316 | 1465.8011 | 0.0695 | 47 | 4310 | 4323 | LMLLSRDDSGS |
| | | | | | | GSK |
| 1487.7952 | 1487.8041 | 0.0089 | 6 | 3435 | 3447 | QTTGEEVLLIQ |
| | | | | | | EK |
| 1502.873 | 1502.8989 | 0.0259 | 17 | 380 | 391 | LLEVWIEFGRIK |
| 1532.6785 | 1532.8186 | 0.1401 | 91 | 3761 | 3773 | ELNPEEGEMVE |
| | | | | | | EK |
| 1708.8389 | 1708.9078 | 0.0689 | 40 | 3551 | 3565 | EGLDKLVSDAN |
| | | | | | | EQYK |
| 1713.8728 | 1713.9175 | 0.0447 | 26 | 3102 | 3116 | HMLEEEGTLDL |
| | | | | | | LGLK |
| 1727.9149 | 1727.9177 | 0.0028 | 2 | 2151 | 2165 | KLLPQAEMFEH |
| | | | | | | LSGK |
| 1950.9412 | 1951.001 | 0.0598 | 31 | 4830 | 4845 | ALIAEHQTFME |
| | | | | | | EMTRK |
| 1966.9362 | 1966.9954 | 0.0592 | 30 | 4830 | 4845 | ALIAEHQTFME |
| | | | | | | EMTRK |
| 2185.0693 | 2185.1575 | 0.0882 | 40 | 3755 | 3773 | IGPQLKELNPE |
| | | | | | | EGEMVEEK |
| 2186.155 | 2186.0022 | −0.1528 | −70 | 1958 | 1978 | LLSDTVASDPG |
| | | | | | | VLQEQLA |
| | | | | | | TTK |
| 2186.1851 | 2186.1931 | 0.008 | 4 | 2843 | 2861 | MSELRVTLDPV |
| | | | | | | QLESSLLR |
| 2200.0632 | 2200.0994 | 0.0362 | 16 | 3885 | 3901 | EIQDKLDQMVF |
| | | | | | | FWEDIK |
| 2202.1799 | 2202.2275 | 0.0476 | 22 | 2843 | 2861 | MSELRVTLDPVQLESSLLR |
| | 2202.2275 | | | | | |
| 2212.2183 | 2212.3137 | 0.0954 | 43 | 3428 | 3447 | NGQALLKQTTGEEVLLIQ |
| | | | | | | EK |

| | |
|---|---|
| IPI00853061 | Tax_Id = 9606 |
| | Gene_Symbol = COL6A3 |
| | collagen alpha-3(VI) chain |
| | isoform 2 precursor |

[0692] Peptide Information

| | | | | Start | End | |
|---|---|---|---|---|---|---|
| Calc. Mass | Obsrv. Mass | ±da | ±ppm | Seq. | Seq. | Sequence |
| 896.4625 | 896.4256 | −0.0369 | −41 | 246 | 252 | TNFPYVR |
| 910.5104 | 910.4317 | −0.0787 | −86 | 293 | 300 | SDILGHLR |
| 910.5104 | 910.4317 | −0.0787 | −86 | 293 | 300 | SDILGHLR |
| 1187.7008 | 1187.681 | −0.0198 | −17 | 915 | 924 | NIFKRPLGSR |
| 1187.7008 | 1187.681 | −0.0198 | −17 | 915 | 924 | NIFKRPLGSR |
| 1320.7311 | 1320.6184 | −0.1127 | −85 | 558 | 569 | QSGWPFIFQAK |
| 1420.7948 | 1420.7368 | −0.058 | −41 | 635 | 646 | SGFPLLKEFVQR |
| 1425.7445 | 1425.8451 | 0.1006 | 71 | 219 | 231 | TLSGTPEVHSNKR |
| 1425.7445 | 1425.8451 | 0.1006 | 71 | 219 | 231 | TLSGTPEVHSNKR |
| 1579.9781 | 1579.8885 | −0.0896 | −57 | 138 | 153 | AAEGIPKLLVLITG |
| | | | | | | GK |
| 1950.9518 | 1951.001 | 0.0492 | 25 | 1018 | 1036 | YPPPGEMGASEV |
| | | | | | | LLGAF |
| | | | | | | SI |
| 2185.1323 | 2185.1575 | 0.0252 | 12 | 107 | 126 | KMKPLDGSALYT |
| | | | | | | GSALD |
| | | | | | | FVR |
| 2200.2449 | 2200.0994 | −0.1455 | −66 | 524 | 544 | SAGSRIEDGVLQ |
| | | | | | | FLVLLV |
| | | | | | | AGR |
| 2202.1919 | 2202.2275 | 0.0356 | 16 | 549 | 569 | VDGPASNLKQSG |
| | | | | | | VVPFIF |
| | | | | | | QAK |

| | |
|---|---|
| IPI00029760 | Tax_Id = 9606 Gene _Symbol = FGF4 |
| | Fibroblast growth factor 4 |

[0693] Peptide Information

| | Obsrv. | | | Start | End | |
|---|---|---|---|---|---|---|
| Calc. Mass | Mass | ±da | ±ppm | Seq. | Seq. | Sequence |
| 1005.5146 | 1005.6021 | 0.0875 | 87 | 190 | 198 | GNRVSPTMK |
| 1257.6686 | 1257.6628 | −0.0058 | −5 | 113 | 123 | DSLLELSPVER |
| 1257.6686 | 1257.6628 | −0.0058 | −5 | 113 | 123 | DSLLELSPVER |
| 1425.7559 | 1425.8451 | 0.0892 | 63 | 174 | 186 | YPGMFIALSKNGK |
| 1425.7559 | 1425.8451 | 0.0892 | 63 | 174 | 186 | YPGMFIALSKNGK |
| 2186.1289 | 2186.0022 | −0.1267 | −58 | 85 | 103 | RLYCNVGIGFHL |
| | | | | | | QALPDGR |
| 2186.1289 | 2186.1931 | 0.0642 | 29 | 85 | 103 | RLYCNVGIGFHL |
| | | | | | | QALPDGR |

| | |
|---|---|
| IPI00291868 | Tax_Id = 9606 Gene_Symbol = FBXO41 |
| | F-box only protein 41 |

[0694] Peptide Information

| | | | | Start | End | |
|---|---|---|---|---|---|---|
| Calc. Mass | Obsrv. Mass | ±da | ±ppm | Seq. | Seq. | Sequence |
| 982.4914 | 982.4271 | −0.0643 | −65 | 907 | 914 | LFEDMVTK |
| 1465.7329 | 1465.8011 | 0.0682 | 47 | 30 | 43 | MAGASPAVPHER |
| | | | | | | AR |
| 1465.7329 | 1465.8011 | 0.0682 | 47 | 30 | 43 | MAGASPAVPHER |
| | | | | | | AR |
| 1579.8513 | 1579.8885 | 0.0372 | 24 | 907 | 919 | LFEDMVTKLQALR |
| 1713.9065 | 1713.9175 | 0.011 | 6 | 808 | 826 | ALGVGGAGCGV |
| | | | | | | QGLASL |
| | | | | | | AR |
| 2894.479 | 2894.4836 | 0.0046 | 2 | 2 | 27 | TTGLSDQQVVCD |
| | | | | | | LDHRA |
| | | | | | | VEALLQAVR |

| | |
|---|---|
| IP101012037 | Tax_Id = 9606 Gene_Symbol = MCM8 |
| | Uncharacterized protein |

[0695] Peptide Information

| | | | | Start | End | |
|---|---|---|---|---|---|---|
| Calc. Mass | Obsrv. Mass | ±da | ±ppm | Seq. | Seq. | Sequence |
| 982.4523 | 982.4271 | −0.0252 | −26 | 1 | 8 | MNGEYRGR |
| 1065.5225 | 1065.5122 | −0.0103 | −10 | 23 | 32 | GGGNFSGKWR |
| 1479.769 | 1479.8186 | 0.0496 | 34 | 48 | 60 | TSEQTPQFLLSTK |
| 2170.1238 | 2170.114 | −0.0098 | −5 | 127 | 146 | ELTEGGEVTNLIP |
| | | | | | | DIATELR |
| 2185.1467 | 2185.1575 | 0.0108 | 5 | 152 | 170 | TLACMGLAIHQVL |
| | | | | | | TKDLER |
| 2212.1465 | 2212.3137 | 0.1672 | 76 | 147 | 166 | DAPEKTLACMGL |
| | | | | | | AIHQVL |

6no matched protein found

| 157/G8 | Instr./Gel Origin |
|---|---|
| [1] Sample Project | |
| 20111201 | Instrument Sample |

| | | |
|---|---|---|
| Accession No. | Protein Name | Name |

| | |
|---|---|
| IPI00160622 | Tax_Id = 9606 Gene_Symbol = |
| | CEP250 Isoform 1 of |
| | Centrosome-associated protein |
| | CEP250 |

[0696] KH26 (SEQ ID NO. KH26) Peptide Information

| | Obsrv. | | | Start | | |
|---|---|---|---|---|---|---|
| Calc. Mass | Mass | ±da | ±ppm | Seq. | End Seq. | Sequence |
| 985.5537 | 985.5631 | 0.0094 | 10 | 399 | 406 | RQAVQDLR |
| 985.5537 | 985.5631 | 0.0094 | 10 | 399 | 406 | RQAVQDLR |
| 1097.4966 | 1097.5127 | 0.0161 | 15 | 883 | 890 | EKMELEMR |
| 1232.6117 | 1232.6179 | 0.0062 | 5 | 1390 | 1399 | LKNEEVESER |
| 1257.691 | 1257.6606 | −0.0304 | −24 | 1667 | 1676 | IQVLEDQRTR |
| 1257.705 | 1257.6606 | −0.0444 | −35 | 601 | 612 | LSALNEALALDK |
| 1283.6776 | 1283.6473 | −0.0303 | −24 | 122 | 132 | LHMEKADVVNK |
| 1350.6471 | 1350.7144 | 0.0673 | 50 | 190 | 200 | HFLEMKSATDR |
| 1425.7081 | 1425.8483 | 0.1402 | 98 | 2371 | 2382 | QDYITRSAQTSR |
| 1425.7081 | 1425.8483 | 0.1402 | 98 | 2371 | 2382 | QDYITRSAQTSR |
| 1487.77 | 1487.7893 | 0.0193 | 13 | 753 | 766 | QDLAEQLQGLS |
| | | | | | | SAK |
| 1532.785 | 1532.8113 | 0.0263 | 17 | 1698 | 1709 | ELTTQRQLMQ |
| | | | | | | ER |
| 1579.7819 | 1579.8809 | 0.099 | 63 | 522 | 534 | ERLQEMLMGL |
| | | | | | | EAK |
| 1657.9484 | 1657.8533 | −0.0951 | −57 | 926 | 939 | ERVSLLETLLQ |
| | | | | | | TQK |
| 1708.9089 | 1708.9053 | −0.0036 | −2 | 2292 | 2305 | HNVQLRSTLEQ |
| | | | | | | VER |
| 1713.8767 | 1713.9238 | 0.0471 | 27 | 492 | 507 | VNVELQLQGD |
| | | | | | | SAQGQK |
| 2092.1001 | 2091.998 | −0.1021 | −49 | 212 | 230 | LSGSLLTCCLR |
| | | | | | | LTVGAQS R |

| | |
|---|---|
| IPI00292871 | Tax_Id = 9606 Gene_Symbol = CEP250 |
| | Isoform 2 of Centrosome-associated protein CEP250 |

[0697] Peptide Information

| | Obsrv. | | | Start | End | |
|---|---|---|---|---|---|---|
| Calc. Mass | Mass | ±da | ±ppm | Seq. | Seq. | Sequence |
| 985.5537 | 985.5631 | 0.0094 | 10 | 399 | 406 | RQAVQDLR |
| 985.5537 | 985.5631 | 0.0094 | 10 | 399 | 406 | RQAVQDLR |
| 1232.6117 | 1232.6179 | 0.0062 | 5 | 1334 | 1343 | LKNEEVESER |
| 1257.691 | 1257.6606 | −0.0304 | −24 | 1611 | 1620 | IQVLEDQRTR |
| 1257.705 | 1257.6606 | −0.0444 | −35 | 601 | 612 | LSALNEALALDK |
| 1283.6776 | 1283.6473 | −0.0303 | −24 | 122 | 132 | LHMEKADVVNK |
| 1350.6471 | 1350.7144 | 0.0673 | 50 | 190 | 200 | HFLEMKSATDR |
| 1425.7081 | 1425.8483 | 0.1402 | 98 | 2315 | 2326 | QDYITRSAQTSR |
| 1425.7081 | 1425.8483 | 0.1402 | 98 | 2315 | 2326 | QDYITRSAQTSR |
| 1487.77 | 1487.7893 | 0.0193 | 13 | 753 | 766 | QDLAEQLQGLSSAK |
| 1532.785 | 1532.8113 | 0.0263 | 17 | 1642 | 1653 | ELTTQRQLMQER |
| 1579.7819 | 1579.8809 | 0.099 | 63 | 522 | 534 | ERLQEMLMGLEAK |
| 1657.9484 | 1657.8533 | −0.0951 | −57 | 870 | 883 | ERVSLLETLLQTQK |
| 1708.9089 | 1708.9053 | −0.0036 | −2 | 2236 | 2249 | HNVQLRSTLEQVER |
| | 1708.9053 | | | | | |
| 1713.8767 | 1713.9238 | 0.0471 | 27 | 492 | 507 | VNVELQLQGDSAQGQK |
| 2092.1001 | 2091.998 | −0.1021 | −49 | 212 | 230 | LSGSLLTCCLRLTVGAQSR |

| | |
|---|---|
| IPI00945119 | Tax_Id = 9606 |
| | Gene_Symbol = CEP250 |
| | Uncharacterized protein |

[0698] Peptide Information

| | | | | | | |
|---|---|---|---|---|---|---|
| | Obsrv. | | | Start | End | |
| Calc. Mass | Mass | ±da | ±ppm | Seq. | Seq. | Sequence |

| | | | | | | |
|---|---|---|---|---|---|---|
| 985.5537 | 985.5631 | 0.0094 | 10 | 399 | 406 | RQAVQDLR |
| 985.5537 | 985.5631 | 0.0094 | 10 | 399 | 406 | RQAVQDLR |
| 1283.6776 | 1283.6473 | −0.0303 | −24 | 122 | 132 | LHMEKADVVNK |
| 1350.6471 | 1350.7144 | 0.0673 | 50 | 190 | 200 | HFLEMKSATDR |
| 1546.837 | 1546.7799 | −0.0571 | −37 | 524 | 536 | LQSSQLQSCRVLK |
| 1713.8767 | 1713.9238 | 0.0471 | 27 | 492 | 507 | VNVELQLQGDSA |
| | | | | | | QGQK |
| 2092.1001 | 2091.998 | −0.1021 | −49 | 212 | 230 | LSGSLLTCCLRLT |
| | | | | | | VGAQSR |

| | |
|---|---|
| IPI01018940 | Tax_Id = 9606 Gene_Symbol = MACF1 |
| | Isoform 3 of Microtubule-actin cross-linking |
| | factor 1, isoforms 1/2/3/5 |

[0699] Peptide Information

| | | | | Start | End | |
|---|---|---|---|---|---|---|
| Calc. Mass | Obsrv. Mass | ±da | ±ppm | Seq. | Seq. | Sequence |
| 842.4519 | 842.4806 | 0.0287 | 34 | 4409 | 4415 | WHVVSSK |
| 870.5229 | 870.511 | −0.0119 | −14 | 3680 | 3687 | LMALGPIR |
| 910.4265 | 910.4239 | −0.0026 | −3 | 3420 | 3426 | YSEIQDR |
| 910.4265 | 910.4239 | −0.0026 | −3 | 3420 | 3426 | YSEIQDR |
| 1021.5499 | 1021.5206 | −0.0293 | −29 | 2495 | 2502 | QQVQFMLK |
| 1021.5499 | 1021.5206 | −0.0293 | −29 | 2495 | 2502 | QQVQFMLK |
| 1170.6841 | 1170.6456 | −0.0385 | −33 | 3256 | 3265 | VVKAQIQEQK |
| 1187.6201 | 1187.673 | 0.0529 | 45 | 2701 | 2710 | NCPISAKLER |
| 1232.6117 | 1232.6179 | 0.0062 | 5 | 2603 | 2612 | QQLEETSEIR |
| 1257.6797 | 1257.6606 | −0.0191 | −15 | 1471 | 1481 | QISEQLNALNK |
| 1257.6797 | 1257.6606 | −0.0191 | −15 | 1471 | 1481 | QISEQLNALNK |
| 1261.694 | 1261.6659 | −0.0281 | −22 | 345 | 354 | LLEVWIEFGR |
| 1320.7271 | 1320.6123 | −0.1148 | −87 | 1835 | 1846 | GDLRFVTISGQK |
| 1406.7386 | 1406.7148 | −0.0238 | −17 | 4591 | 4602 | QPVYDTTIRTGR |
| 1406.7386 | 1406.7148 | −0.0238 | −17 | 4591 | 4602 | QPVYDTTIRTGR |
| | 1406.7148 | | | | | |
| 1413.7809 | 1413.8362 | 0.0553 | 39 | 3100 | 3111 | ARQEQLELTLGR |
| 1420.7213 | 1420.736 | 0.0147 | 10 | 2884 | 2895 | TGSLEEMTQRLR |
| 1425.7156 | 1425.8483 | 0.1327 | 93 | 834 | 845 | NTISVKAVCDYR |
| 1425.7156 | 1425.8483 | 0.1327 | 93 | 834 | 845 | NTISVKAVCDYR |
| 1428.7693 | 1428.7908 | 0.0215 | 15 | 4996 | 5007 | LNDALDRLEELK |
| 1450.6996 | 1450.7076 | 0.008 | 6 | 2100 | 2110 | FEQLCLQQQEK |
| 1465.7281 | 1465.804 | 0.0759 | 52 | 4372 | 4383 | EETYNQLLDKGR |
| 1465.7316 | 1465.804 | 0.0724 | 49 | 4384 | 4397 | LMLLSRDDSGSG |
| | | | | | | SK |
| 1487.7952 | 1487.7893 | −0.0059 | −4 | 3509 | 3521 | QTTGEEVLLIQEK |
| 1502.873 | 1502.896 | 0.023 | 15 | 345 | 356 | LLEVWIEFGRIK |
| 1502.873 | 1502.896 | 0.023 | 15 | 345 | 356 | LLEVWIEFGRIK |
| 1532.6785 | 1532.8113 | 0.1328 | 87 | 3835 | 3847 | ELNPEEGEMVEEK |
| 1546.8727 | 1546.7799 | −0.0928 | −60 | 3982 | 3994 | EIKFLDVLELAEK |
| 1707.7603 | 1707.8604 | 0.1001 | 59 | 854 | 867 | NDECVLEDNSQR |
| | | | | | | TK |
| 1708.8389 | 1708.9053 | 0.0664 | 39 | 3625 | 3639 | EGLDKLVSDAN |
| | | | | | | EQYK |
| 1713.8728 | 1713.9238 | 0.051 | 30 | 3067 | 3081 | HMLEEEGTLDL |
| | | | | | | LGLK |
| 1727.9149 | 1727.9309 | 0.016 | 9 | 2116 | 2130 | KLLPQAEMFEH |
| | | | | | | LSGK |
| 1813.8942 | 1813.937 | 0.0428 | 24 | 3964 | 3977 | LDQMVFFWEDI |
| | | | | | | KAR |
| 1950.9412 | 1951.0114 | 0.0702 | 36 | 4904 | 4919 | ALIAEHQTFME |
| | | | | | | EMTRK |
| 1966.9362 | 1967.0013 | 0.0651 | 33 | 4904 | 4919 | ALIAEHQTFME |
| | | | | | | EMTRK |
| 2091.9805 | 2091.998 | 0.0175 | 8 | 461 | 476 | DENYYQLEELA |
| | | | | | | FRVMR |
| 2186.155 | 2185.9929 | −0.1621 | −74 | 1923 | 1943 | LLSDTVASDPG |
| | | | | | | VLQEQLA |
| | | | | | | TTK |
| 2186.1851 | 2186.1921 | 0.007 | 3 | 2808 | 2826 | MSELRVTLDPV |
| | | | | | | QLESSLLR |
| 2211.1301 | 2211.2874 | 0.1573 | 71 | 5151 | 5170 | STVMVRVGGG |
| | | | | | | WMALDE |
| | | | | | | FLVK |
| 2501.2268 | 2501.4001 | 0.1733 | 69 | 1304 | 1323 | FSQQYSTIVKD |
| | | | | | | YELQLMT |
| | | | | | | YK |

| | |
|---|---|
| IPI00940730 | Tax_Id = 9606 Gene_Symbol = ENOPH1 |
| | Uncharacterized protein |

[0700] Peptide Information

| | | | | Start | End | |
|---|---|---|---|---|---|---|
| Calc. Mass | Obsrv. Mass | ±da | ±ppm | Seq. | Seq. | Sequence |
| 1320.6947 | 1320.6123 | −0.0824 | −62 | 129 | 140 | AEFFADVVPAVR |
| 1479.7729 | 1479.8213 | 0.0484 | 33 | 29 | 40 | DILFPYIEENVK |
| 1579.8302 | 1579.8809 | 0.0507 | 32 | 127 | 140 | MKAEFFADVVPA |
| | | | | | | VR |
| 1745.8654 | 1745.9501 | 0.0847 | 49 | 112 | 126 | QLQGHMWRAAF |
| | | | | | | TAGR |
| | 1745.9501 | | | | | |
| 2878.4734 | 2878.4966 | 0.0232 | 8 | 162 | 187 | LLFGHSTE |
| | | | | | | GDILELVDGH |
| | | | | | | FDTKIGHK |
| 3854.9124 | 3855.2363 | 0.3239 | 84 | 149 | 183 | VYIYSSGSVEAQKLLFGH |
| | | | | | | STEGDILELVDGHFDTK |

| | |
|---|---|
| IPI00792418 | Tax_Id = 9606 Gene_Symbol = NCOR1 |
| | Nuclear receptor co-repressor isoform 1 |

[0701] Peptide Information

| | | | | Start | End | |
|---|---|---|---|---|---|---|
| Calc. Mass | Obsrv. Mass | ±da | ±ppm | Seq. | Seq. | Sequence |
| 1257.6184 | 1257.6606 | 0.0422 | 34 | 22 | 32 | SVAYMPYAEVK |
| 1257.6184 | 1257.6606 | 0.0422 | 34 | 22 | 32 | SVAYMPYAEVK |
| 1413.7195 | 1413.8362 | 0.1167 | 83 | 22 | 33 | SVAYMPYAEVKR |
| 1465.67 | 1465.804 | 0.134 | 91 | 3 | 16 | SSTSPCGTSKSP |
| | | | | | | NR |
| 1465.67 | 1465.804 | 0.134 | 91 | 3 | 16 | SSTSPCGTSKSP |
| | | | | | | NR |
| 1741.8398 | 1741.8694 | 0.0296 | 17 | 33 | 47 | RALEQEAQMHNT |
| | | | | | | AAR |
| 2199.1809 | 2199.1213 | −0.0596 | −27 | 73 | 92 | YSVPPVLQPAPH |
| | | | | | | QVITNL |
| | | | | | | PE |

| | |
|---|---|
| IPI01012199 | Tax_Id = 9606 Gene_Symbol = MACF1 |
| | Uncharacterized protein |

[0702] Protein Group

| | |
|---|---|
| IPI00256861 | Tax_Id = 9606 Gene_Symbol = MACF1 Isoform 2 of |
| | Microtubule-actin cross-linking factor 1, isoforms 1/2/3/5 |

[0703] Peptide Information

| | Obsrv. | | | Start | End | |
|---|---|---|---|---|---|---|
| Calc. Mass | Mass | ±da | ±ppm | Seq. | Seq. | Sequence |
| 842.4519 | 842.4806 | 0.0287 | 34 | 4465 | 4471 | WHVVSSK |
| 870.5229 | 870.511 | −0.0119 | −14 | 3736 | 3743 | LMALGPIR |
| 910.4265 | 910.4239 | −0.0026 | −3 | 3476 | 3482 | YSEIQDR |
| 910.4265 | 910.4239 | −0.0026 | −3 | 3476 | 3482 | YSEIQDR |
| 1021.5499 | 1021.5206 | −0.0293 | −29 | 2551 | 2558 | QQVQFMLK |
| 1021.5499 | 1021.5206 | −0.0293 | −29 | 2551 | 2558 | QQVQFMLK |
| 1170.6841 | 1170.6456 | −0.0385 | −33 | 3312 | 3321 | VVKAQIQEQK |
| 1187.6201 | 1187.673 | 0.0529 | 45 | 2757 | 2766 | NCPISAKLER |
| 1232.6117 | 1232.6179 | 0.0062 | 5 | 2659 | 2668 | QQLEETSEIR |
| 1257.6797 | 1257.6606 | −0.0191 | −15 | 1506 | 1516 | QISEQLNALNK |
| 1257.6797 | 1257.6606 | −0.0191 | −15 | 1506 | 1516 | QISEQLNALNK |
| 1261.694 | 1261.6659 | −0.0281 | −22 | 380 | 389 | LLEVWIEFGR |
| | 1261.6659 | | | | | |
| 1320.7271 | 1320.6123 | −0.1148 | −87 | 1870 | 1881 | GDLRFVTISGQK |
| 1406.7386 | 1406.7148 | −0.0238 | −17 | 4647 | 4658 | QPVYDTTIRTGR |
| 1406.7386 | 1406.7148 | −0.0238 | −17 | 4647 | 4658 | QPVYDTTIRTGR |
| 1413.7809 | 1413.8362 | 0.0553 | 39 | 3156 | 3167 | ARQEQLELTLGR |
| 1420.7213 | 1420.736 | 0.0147 | 10 | 2940 | 2951 | TGSLEEMTQRLR |
| 1425.7156 | 1425.8483 | 0.1327 | 93 | 869 | 880 | NTISVKAVCDYR |
| 1425.7156 | 1425.8483 | 0.1327 | 93 | 869 | 880 | NTISVKAVCDYR |
| 1428.7693 | 1428.7908 | 0.0215 | 15 | 5052 | 5063 | LNDALDRLEELK |
| 1450.6996 | 1450.7076 | 0.008 | 6 | 2135 | 2145 | FEQLCLQQQEK |
| 1465.7281 | 1465.804 | 0.0759 | 52 | 4428 | 4439 | EETYNQLLDKGR |
| 1465.7316 | 1465.804 | 0.0724 | 49 | 4440 | 4453 | LMLLSRDDSGSGSK |
| 1487.7952 | 1487.7893 | −0.0059 | −4 | 3565 | 3577 | QTTGEEVLLIQEK |
| 1502.873 | 1502.896 | 0.023 | 15 | 380 | 391 | LLEVWIEFGRIK |
| 1502.873 | 1502.896 | 0.023 | 15 | 380 | 391 | LLEVWIEFGRIK |
| 1532.6785 | 1532.8113 | 0.1328 | 87 | 3891 | 3903 | ELNPEEGEMVEEK |
| 1546.8727 | 1546.7799 | −0.0928 | −60 | 4038 | 4050 | EIKFLDVLELAEK |
| 1707.7603 | 1707.8604 | 0.1001 | 59 | 889 | 902 | NDECVLEDNSQRTK |
| 1708.8389 | 1708.9053 | 0.0664 | 39 | 3681 | 3695 | EGLDKLVSDANEQYK |
| 1713.8728 | 1713.9238 | 0.051 | 30 | 3123 | 3137 | HMLEEEGTLDLLGLK |
| 1727.9149 | 1727.9309 | 0.016 | 9 | 2151 | 2165 | KLLPQAEMFEHLSGK |
| 1813.8942 | 1813.937 | 0.0428 | 24 | 4020 | 4033 | LDQMVFFWEDIKAR |
| 1950.9412 | 1951.0114 | 0.0702 | 36 | 4960 | 4975 | ALIAEHQTFMEEMTRK |
| 1966.9362 | 1967.0013 | 0.0651 | 33 | 4960 | 4975 | ALIAEHQTFMEEMTRK |
| 2091.9805 | 2091.998 | 0.0175 | 8 | 496 | 511 | DENYYQLEELA |
| | | | | | | FRVMR |
| 2186.155 | 2185.9929 | −0.1621 | −74 | 1958 | 1978 | LLSDTVASDPG |
| | | | | | | VLQEQLA |
| | | | | | | TTK |
| 2186.1851 | 2186.1921 | 0.007 | 3 | 2864 | 2882 | MSELRVTLDPV |
| | | | | | | QLESSLLR |
| 2211.1301 | 2211.2874 | 0.1573 | 71 | 5207 | 5226 | STVMVRVGGG |
| | | | | | | WMALDE |
| | | | | | | FLVK |
| 2501.2268 | 2501.4001 | 0.1733 | 69 | 1339 | 1358 | FSQQYSTIVKD |
| | | | | | | YELQLMT |
| | | | | | | YK |

| | |
|---|---|
| IPI00877954 | Tax_Id = 9606 |
| | Gene_Symbol = DECR2 5 kDa protein |

[0704] Peptide Information

| | | | | Start | End | |
|---|---|---|---|---|---|---|
| Calc. Mass | Obsrv. Mass | ±da | ±ppm | Seq. | Seq. | Sequence |
| 879.4756 | 879.389 | −0.0866 | −98 | 44 | 50 | IAEIFMR |
| 1170.6089 | 1170.6456 | 0.0367 | 31 | 19 | 27 | HLFCPDLLR |
| 1413.7308 | 1413.8362 | 0.1054 | 75 | 19 | 29 | HLFCPDLLRDK |
| 2199.1743 | 2199.1213 | −0.053 | −24 | 30 | 50 | VAFITGGGSGIGF |
| | | | | | | RIAEIF MR |

| | |
|---|---|
| IPI00038378 | Tax_Id = 9606 Gene_Symbol = ENOPH1 Isoform 1 of |
| | Enolase-phosphatase E1 |

[0705] Peptide Information

| | | | | Start | End | |
|---|---|---|---|---|---|---|
| Calc. Mass | Obsrv. Mass | ±da | ±ppm | Seq. | Seq. | Sequence |
| 1320.6947 | 1320.6123 | −0.0824 | −62 | 129 | 140 | AEFFADVVPAVR |
| 1479.7729 | 1479.8213 | 0.0484 | 33 | 29 | 40 | DILFPYIEENVK |
| 1579.8302 | 1579.8809 | 0.0507 | 32 | 127 | 140 | MKAEFFADVVPA |
| | | | | | | VR |
| 1745.8654 | 1745.9501 | 0.0847 | 49 | 112 | 126 | QLQGHMWRAAF |
| | | | | | | TAGR |
| 2878.4734 | 2878.4966 | 0.0232 | 8 | 162 | 187 | LLFGHSTEGDILE |
| | | | | | | LVDGH |
| | | | | | | FDTKIGHK |
| 3854.9124 | 3855.2363 | 0.3239 | 84 | 149 | 183 | VYIYSSGSVEAQK |
| | | | | | | LLFGH |
| | | | | | | STEGDILELVDGH |
| | | | | | | FDTK |

| | |
|---|---|
| IPI00289815 | Tax_Id = 9606 Gene_Symbol = WDR7 Isoform 2 of WD |
| | repeat-containing protein 7 |

[0706] Peptide Information

| | | | | Start | End | |
|---|---|---|---|---|---|---|
| Calc. Mass | Obsrv. Mass | ±da | ±ppm | Seq. | Seq. | Sequence |
| 985.5676 | 985.5631 | −0.0045 | −5 | 868 | 877 | KLPASEGVGK |
| 985.5676 | 985.5631 | −0.0045 | −5 | 868 | 877 | KLPASEGVGK |
| 1097.5773 | 1097.5127 | −0.0646 | −59 | 1442 | 1451 | NVILMAHDGK |
| 1257.5609 | 1257.6606 | 0.0997 | 79 | 1323 | 1331 | FYMVSYYER |
| 1257.5609 | 1257.6606 | 0.0997 | 79 | 1323 | 1331 | FYMVSYYER |
| 1261.6107 | 1261.6659 | 0.0552 | 44 | 983 | 991 | WQDRCLEVR |
| 1271.6743 | 1271.6776 | 0.0033 | 3 | 1362 | 1374 | GPITAVAFAPD |
| | | | | | | GR |
| 1320.7205 | 1320.6123 | −0.1082 | −82 | 636 | 647 | SLAALKNMAH |
| | | | | | | HK |
| 1350.6294 | 1350.7144 | 0.085 | 63 | 1312 | 1322 | GLQECFPAICR |
| 1406.7097 | 1406.7148 | 0.0051 | 4 | 669 | 680 | YSHNSLMVQAIK |
| 1406.7097 | 1406.7148 | 0.0051 | 4 | 669 | 680 | YSHNSLMVQAIK |
| 1420.689 | 1420.736 | 0.047 | 33 | 285 | 297 | LPASCLPASDS |
| | | | | | | FR |
| 1713.8846 | 1713.9238 | 0.0392 | 23 | 271 | 284 | VIIWTENGQSY |
| | | | | | | IYK |
| 1951.0834 | 1951.0114 | −0.072 | −37 | 1141 | 1157 | HTCKALTFLLL |
| | | | | | | QPPSPK |
| 2185.9666 | 2185.9929 | 0.0263 | 12 | 756 | 772 | EHLLDDEEED |
| | | | | | | EEIMRQR |
| 3038.4968 | 3038.5745 | 0.0777 | 26 | 480 | 505 | YDQRYLISGGV |
| | | | | | | DFSVIIW |
| | | | | | | DIFSGEMK |
| 3854.9578 | 3855.2363 | 0.2785 | 72 | 949 | 981 | QGWSQLAAM |
| | | | | | | HCVMLPD |
| | | | | | | LLGLDKFRPPL |
| | | | | | | LEMLAR |

7 no matched protein found

| 158/G9 | Instr./Gel Origin |
|---|---|
| [1] Sample Project | |
| 20111201 | Instrument Sample |

| | | |
|---|---|---|
| Accession No. | Protein Name | Name |

| | |
|---|---|
| IPI00289815 | Tax_Id = 9606 Gene_Symbol = |
| | WDR7 Isoform 2 of WD |
| | repeat-containing protein 7 |

[0707] KH27 (SEQ ID NO. KH27) Peptide Information

| | | | | Start | End | |
|---|---|---|---|---|---|---|
| Calc. Mass | Obsrv. Mass | ±da | ±ppm | Seq. | Seq. | Sequence |
| 985.5676 | 985.5671 | −0.0005 | −1 | 868 | 877 | KLPASEGVGK |
| 1257.5609 | 1257.6626 | 0.1017 | 81 | 1323 | 1331 | FYMVSYYER |
| 1261.6107 | 1261.6564 | 0.0457 | 36 | 983 | 991 | WQDRCLEVR |
| 1261.6107 | 1261.6564 | 0.0457 | 36 | 983 | 991 | WQDRCLEVR |
| 1271.6743 | 1271.6829 | 0.0086 | 7 | 1362 | 1374 | GPITAVAFAPDGR |
| 1320.7205 | 1320.6122 | −0.1083 | −82 | 636 | 647 | SLAALKNMAHHK |
| 1320.7205 | 1320.6122 | −0.1083 | −82 | 636 | 647 | SLAALKNMAHHK |
| 1350.6294 | 1350.6978 | 0.0684 | 51 | 1312 | 1322 | GLQECFPAICR |
| 1406.7097 | 1406.7087 | −0.001 | −1 | 669 | 680 | YSHNSLMVQAIK |
| 1406.7097 | 1406.7087 | −0.001 | −1 | 669 | 680 | YSHNSLMVQAIK |
| 1420.689 | 1420.7378 | 0.0488 | 34 | 285 | 297 | LPASCLPASDSFR |
| 1713.8846 | 1713.9213 | 0.0367 | 21 | 271 | 284 | VIIWTENGQSYIYK |
| 1901.8069 | 1901.9828 | 0.1759 | 92 | 756 | 770 | EHLLDDEEEDEEI |
| | | | | | | MR |
| 1951.0834 | 1950.9768 | −0.1066 | −55 | 1141 | 1157 | HTCKALTFLLLQP |
| | | | | | | PSPK |
| 2092.2278 | 2092.0271 | −0.2007 | −96 | 1224 | 1243 | HALSLIATARPPA |
| | | | | | | FITTIAK |
| 2185.9666 | 2186.0493 | 0.0827 | 38 | 756 | 772 | EHLLDDEEEDEEI |
| | | | | | | MRQR |
| 2185.9666 | 2186.0493 | 0.0827 | 38 | 756 | 772 | EHLLDDEEEDE |
| | | | | | | EIMRQR |
| 2233.1296 | 2233.1709 | 0.0413 | 18 | 1354 | 1374 | CQTIHGHKGPI |
| | | | | | | TAVAFAP |
| | | | | | | DGR |
| 3038.4968 | 3038.5193 | 0.0225 | 7 | 480 | 505 | YDQRYLISGGV |
| | | | | | | DFSVIIW |
| | | | | | | DIFSGEMK |

| | |
|---|---|
| IPI00328832 | Tax_Id = 9606 Gene_Symbol = WDR7 Isoform 1 of WD |
| | repeat-containing protein 7 |

[0708] Peptide Information

| | | | | Start | End | |
|---|---|---|---|---|---|---|
| Calc. Mass | Obsrv. Mass | ±da | ±ppm | Seq. | Seq. | Sequence |
| 985.5676 | 985.5671 | −0.0005 | −1 | 868 | 877 | KLPASEGVGK |
| 1257.5609 | 1257.6626 | 0.1017 | 81 | 1356 | 1364 | FYMVSYYER |
| 1261.6107 | 1261.6564 | 0.0457 | 36 | 1016 | 1024 | WQDRCLEVR |
| 1261.6107 | 1261.6564 | 0.0457 | 36 | 1016 | 1024 | WQDRCLEVR |
| 1271.6743 | 1271.6829 | 0.0086 | 7 | 1395 | 1407 | GPITAVAFAPDGR |
| 1320.7205 | 1320.6122 | −0.1083 | −82 | 636 | 647 | SLAALKNMAHHK |
| 1320.7205 | 1320.6122 | −0.1083 | −82 | 636 | 647 | SLAALKNMAHHK |
| 1350.6294 | 1350.6978 | 0.0684 | 51 | 1345 | 1355 | GLQECFPAICR |
| 1406.7097 | 1406.7087 | −0.001 | −1 | 669 | 680 | YSHNSLMVQAIK |
| 1406.7097 | 1406.7087 | −0.001 | −1 | 669 | 680 | YSHNSLMVQAIK |
| 1420.689 | 1420.7378 | 0.0488 | 34 | 285 | 297 | LPASCLPASDSFR |
| 1713.8846 | 1713.9213 | 0.0367 | 21 | 271 | 284 | VIIWTENGQSYIYK |
| 1901.8069 | 1901.9828 | 0.1759 | 92 | 756 | 770 | EHLLDDEEEDEEI |
| | | | | | | MR |
| 1951.0834 | 1950.9768 | −0.1066 | −55 | 1174 | 1190 | HTCKALTFLLLQP |
| | | | | | | PSPK |
| 2092.2278 | 2092.0271 | −0.2007 | −96 | 1257 | 1276 | HALSLIATARPPA |
| | | | | | | FITTIAK |
| 2185.9666 | 2186.0493 | 0.0827 | 38 | 756 | 772 | EHLLDDEEEDEEI |
| | | | | | | MRQR |
| 2185.9666 | 2186.0493 | 0.0827 | 38 | 756 | 772 | EHLLDDEEEDEEI |
| | | | | | | MRQR |
| 2233.1296 | 2233.1709 | 0.0413 | 18 | 1387 | 1407 | CQTIHGHKGPITA |
| | | | | | | VAFAP |
| | | | | | | DGR |
| 3038.4968 | 3038.5193 | 0.0225 | 7 | 480 | 505 | YDQRYLISGGVD |
| | | | | | | FSVIIW |
| | | | | | | DIFSGEMK |

| | |
|---|---|
| IPI01008928 | Tax_Id = 9606 Gene_Symbol = - Myosin-reactive |
| | immunoglobulin heavy chain variable region (Fragment) |

[0709] Peptide Information

| | | | | Start | End | |
|---|---|---|---|---|---|---|
| Calc. Mass | Obsrv. Mass | ±da | ±ppm | Seq. | Seq. | Sequence |
| 1287.6791 | 1287.6769 | −0.0022 | −2 | 1 | 12 | EVQLVESGAEVK |
| 1320.5525 | 1320.6122 | 0.0597 | 45 | 88 | 98 | SDDTAVYYCAR |
| 1320.5525 | 1320.6122 | 0.0597 | 45 | 88 | 98 | SDDTAVYYCAR |
| 1838.8319 | 1839.0062 | 0.1743 | 95 | 24 | 38 | ASGYTFTGYYMH |
| | | | | | | WVR |
| 2092.0049 | 2092.0271 | 0.0222 | 11 | 68 | 85 | VTMTRDTTISTAY |
| | | | | | | MELSR |
| 2096.9958 | 2097.0576 | 0.0618 | 29 | 105 | 125 | IAAAGDAFDIWG |
| | | | | | | QGTMVT |

| | |
|---|---|
| IPI01012199 | Tax_Id = 9606 Gene_Symbol = MACF1 |
| | Uncharacterized protein |

[0710] Protein Group

| | |
|---|---|
| IPI00256861 | Tax_Id = 9606 Gene_Symbol = MACF1 Isoform 2 of |
| | Microtubule-actin cross-linking factor 1, isoforms 1/2/3/5 |
| | VSS |

[0711] Peptide Information

| | | | | Start | End | |
|---|---|---|---|---|---|---|
| Calc. Mass | Obsrv. Mass | ±da | ±ppm | Seq. | Seq. | Sequence |
| 870.5229 | 870.5264 | 0.0035 | 4 | 3736 | 3743 | LMALGPIR |
| 870.5229 | 870.5264 | 0.0035 | 4 | 3736 | 3743 | LMALGPIR |
| 910.4265 | 910.4365 | 0.01 | 11 | 3476 | 3482 | YSEIQDR |
| 1021.5499 | 1021.5289 | −0.021 | −21 | 2551 | 2558 | QQVQFMLK |
| 1021.5499 | 1021.5289 | −0.021 | −21 | 2551 | 2558 | QQVQFMLK |
| 1170.6841 | 1170.6501 | −0.034 | −29 | 3312 | 3321 | VVKAQIQEQK |
| 1187.6201 | 1187.6735 | 0.0534 | 45 | 2757 | 2766 | NCPISAKLER |
| 1187.6201 | 1187.6735 | 0.0534 | 45 | 2757 | 2766 | NCPISAKLER |
| 1225.6497 | 1225.5806 | −0.0691 | −56 | 3958 | 3968 | MPPLIPAEVDK |
| 1232.6117 | 1232.6139 | 0.0022 | 2 | 2659 | 2668 | QQLEETSEIR |
| 1257.6797 | 1257.6626 | −0.0171 | −14 | 1506 | 1516 | QISEQLNALNK |
| 1261.694 | 1261.6564 | −0.0376 | −30 | 380 | 389 | LLEVWIEFGR |
| 1261.694 | 1261.6564 | −0.0376 | −30 | 380 | 389 | LLEVWIEFGR |
| 1287.6791 | 1287.6769 | −0.0022 | −2 | 4662 | 4672 | EKTLLPEDSQK |
| 1320.7271 | 1320.6122 | −0.1149 | −87 | 1870 | 1881 | GDLRFVTISGQK |
| 1320.7271 | 1320.6122 | −0.1149 | −87 | 1870 | 1881 | GDLRFVTISGQK |
| 1406.7386 | 1406.7087 | −0.0299 | −21 | 4647 | 4658 | QPVYDTTIRTGR |
| 1406.7386 | 1406.7087 | −0.0299 | −21 | 4647 | 4658 | QPVYDTTIRTGR |
| 1413.7809 | 1413.825 | 0.0441 | 31 | 3156 | 3167 | ARQEQLELTLGR |
| 1420.7213 | 1420.7378 | 0.0165 | 12 | 2940 | 2951 | TGSLEEMTQRLR |
| 1425.7156 | 1425.8256 | 0.11 | 77 | 869 | 880 | NTISVKAVCDYR |
| 1450.6996 | 1450.6963 | −0.0033 | −2 | 2135 | 2145 | FEQLCLQQQEK |
| 1465.7281 | 1465.7937 | 0.0656 | 45 | 4428 | 4439 | EETYNQLLDKGR |
| 1465.7316 | 1465.7937 | 0.0621 | 42 | 4440 | 4453 | LMLLSRDDSGSG |
| | | | | | | SK |
| 1502.873 | 1502.8854 | 0.0124 | 8 | 380 | 391 | LLEVWIEFGRIK |
| 1532.6785 | 1532.8059 | 0.1274 | 83 | 3891 | 3903 | ELNPEEGEMVEEK |
| 1546.8727 | 1546.7936 | −0.0791 | −51 | 4038 | 4050 | EIKFLDVLELAEK |
| 1713.8728 | 1713.9213 | 0.0485 | 28 | 3123 | 3137 | HMLEEEGTLDLL |
| | | | | | | GLK |
| 1794.9636 | 1794.8539 | −0.1097 | −61 | 5106 | 5121 | QEFIDGILASKFP |
| | | | | | | TTK |
| 1838.8412 | 1839.0062 | 0.165 | 90 | 4960 | 4974 | ALIAEHQTFM |
| | | | | | | EEMTR |
| 1950.9412 | 1950.9768 | 0.0356 | 18 | 4960 | 4975 | ALIAEHQTFM |
| | | | | | | EEMTRK |
| 1966.9362 | 1966.9713 | 0.0351 | 18 | 4960 | 4975 | ALIAEHQTFME |
| | | | | | | EMTRK |
| 2092.0266 | 2092.0271 | 0.0005 | 0 | 2275 | 2293 | WLKETEGSIPP |
| | | | | | | TETSMSAK |
| 2186.155 | 2186.0493 | −0.1057 | −48 | 1958 | 1978 | LLSDTVASDPG |
| | | | | | | VLQEQLA |
| | | | | | | TTK |
| 2186.155 | 2186.0493 | −0.1057 | −48 | 1958 | 1978 | LLSDTVASDPG |
| | | | | | | VLQEQLA |
| | | | | | | TTK |
| 2200.0632 | 2200.0908 | 0.0276 | 13 | 4015 | 4031 | EIQDKLDQMVF |
| | | | | | | FWEDIK |
| 2233.1135 | 2233.1709 | 0.0574 | 26 | 2462 | 2481 | EALAGLLVTYP |
| | | | | | | NSQEAEN |
| | | | | | | WK |
| 2299.0217 | 2299.2339 | 0.2122 | 92 | 3068 | 3088 | EMFSQLADLDD |
| | | | | | | ELDGMG |
| | | | | | | AIGR |
| 2501.2268 | 2501.3357 | 0.1089 | 44 | 1339 | 1358 | FSQQYSTIVKD |
| | | | | | | YELQLMT |
| | | | | | | YK |

| | |
|---|---|
| IPI00977191 | Tax_Id = 9606 Gene_Symbol = NASP Uncharacterized |
| | protein |

[0712] Peptide Information

| Calc. Mass | Obsrv. Mass | ±da | ±ppm | Start Seq. | End Seq. | |
|---|---|---|---|---|---|---|
| 912.4322 | 912.4548 | 0.0226 | 25 | 40 | 46 | |
| 1851.9004 | 1852.0027 | 0.1023 | 55 | 2 | 20 | AMESTATAAVAA |
| | | | | | | ELVSADK |
| 1966.946 | 1966.9713 | 0.0253 | 13 | 1 | 20 | MAMESTATAAVA |
| | | | | | | AELVS |
| | | | | | | ADK |
| 2299.0906 | 2299.2339 | 0.1433 | 62 | 2 | 24 | AMESTATAAVAA |
| | | | | | | ELVSAD |
| | | | | | | KMSGR |

| | |
|---|---|
| IPI01018940 | Tax_Id = 9606 Gene _Symbol = MACF1 Isoform 3 of |
| | Microtubule-actin cross-linking factor 1, |
| | isoforms 1/2/3/5 |

[0713] Peptide Information

| | | | | | End | |
|---|---|---|---|---|---|---|
| Calc. Mass | Obsrv. Mass | ±da | ±ppm | Start Seq. | Seq. | Sequence |
| 870.5229 | 870.5264 | 0.0035 | 4 | 3680 | 3687 | LMALGPIR |
| 870.5229 | 870.5264 | 0.0035 | 4 | 3680 | 3687 | LMALGPIR |
| 910.4265 | 910.4365 | 0.01 | 11 | 3420 | 3426 | YSEIQDR |
| 1021.5499 | 1021.5289 | −0.021 | −21 | 2495 | 2502 | QQVQFMLK |
| 1021.5499 | 1021.5289 | −0.021 | −21 | 2495 | 2502 | QQVQFMLK |
| 1170.6841 | 1170.6501 | −0.034 | −29 | 3256 | 3265 | VVKAQIQEQK |
| 1187.6201 | 1187.6735 | 0.0534 | 45 | 2701 | 2710 | NCPISAKLER |
| 1187.6201 | 1187.6735 | 0.0534 | 45 | 2701 | 2710 | NCPISAKLER |
| 1225.6497 | 1225.5806 | −0.0691 | −56 | 3902 | 3912 | MPPLIPAEVDK |
| | 1225.5806 | | | | | |
| 1232.6117 | 1232.6139 | 0.0022 | 2 | 2603 | 2612 | QQLEETSEIR |
| 1257.6797 | 1257.6626 | −0.0171 | −14 | 1471 | 1481 | QISEQLNALNK |
| 1261.694 | 1261.6564 | −0.0376 | −30 | 345 | 354 | LLEVWIEFGR |
| 1261.694 | 1261.6564 | −0.0376 | −30 | 345 | 354 | LLEVWIEFGR |
| 1287.6791 | 1287.6769 | −0.0022 | −2 | 4606 | 4616 | EKTLLPEDSQK |
| 1320.7271 | 1320.6122 | −0.1149 | −87 | 1835 | 1846 | GDLRFVTISGQK |
| 1320.7271 | 1320.6122 | −0.1149 | −87 | 1835 | 1846 | GDLRFVTISGQK |
| 1406.7386 | 1406.7087 | −0.0299 | −21 | 4591 | 4602 | QPVYDTTIRTGR |
| 1406.7386 | 1406.7087 | −0.0299 | −21 | 4591 | 4602 | QPVYDTTIRTGR |
| 1413.7809 | 1413.825 | 0.0441 | 31 | 3100 | 3111 | ARQEQLELTLGR |
| 1420.7213 | 1420.7378 | 0.0165 | 12 | 2884 | 2895 | TGSLEEMTQRLR |
| 1425.7156 | 1425.8256 | 0.11 | 77 | 834 | 845 | NTISVKAVCDYR |
| 1450.6996 | 1450.6963 | −0.0033 | −2 | 2100 | 2110 | FEQLCLQQQEK |
| 1465.7281 | 1465.7937 | 0.0656 | 45 | 4372 | 4383 | EETYNQLLDKGR |
| 1465.7316 | 1465.7937 | 0.0621 | 42 | 4384 | 4397 | LMLLSRDDSGS |
| | | | | | | GSK |
| 1502.873 | 1502.8854 | 0.0124 | 8 | 345 | 356 | LLEVWIEFGRIK |
| 1532.6785 | 1532.8059 | 0.1274 | 83 | 3835 | 3847 | ELNPEEGEMVE |
| | | | | | | EK |
| 1546.8727 | 1546.7936 | −0.0791 | −51 | 3982 | 3994 | EIKFLDVLELAEK |
| 1713.8728 | 1713.9213 | 0.0485 | 28 | 3067 | 3081 | HMLEEEGTLDL |
| | | | | | | LGLK |
| 1794.9636 | 1794.8539 | −0.1097 | −61 | 5050 | 5065 | QEFIDGILASKF |
| | | | | | | PTTK |
| 1838.8412 | 1839.0062 | 0.165 | 90 | 4904 | 4918 | ALIAEHQTFME |
| | | | | | | EMTR |
| 1950.9412 | 1950.9768 | 0.0356 | 18 | 4904 | 4919 | ALIAEHQTFME |
| | | | | | | EMTRK |
| 1966.9362 | 1966.9713 | 0.0351 | 18 | 4904 | 4919 | ALIAEHQTFME |
| | | | | | | EMTRK |
| 2092.0266 | 2092.0271 | 0.0005 | 0 | 2240 | 2258 | WLKETEGSIPP |
| | | | | | | TETSMSAK |
| 2186.155 | 2186.0493 | −0.1057 | −48 | 1923 | 1943 | LLSDTVASDPG |
| | | | | | | VLQEQLA |
| | | | | | | TTK |
| 2186.155 | 2186.0493 | −0.1057 | −48 | 1923 | 1943 | LLSDTVASDPG |
| | | | | | | VLQEQLA |
| | | | | | | TTK |
| 2200.0632 | 2200.0908 | 0.0276 | 13 | 3959 | 3975 | EIQDKLDQMVF |
| | | | | | | FWEDIK |
| 2233.1135 | 2233.1709 | 0.0574 | 26 | 2406 | 2425 | EALAGLLVTYP |
| | | | | | | NSQEAEN |
| | | | | | | WK |
| 2299.0217 | 2299.2339 | 0.2122 | 92 | 3012 | 3032 | EMFSQLADLDD |
| | | | | | | ELDGMG |
| | | | | | | AIGR |
| 2501.2268 | 2501.3357 | 0.1089 | 44 | 1304 | 1323 | FSQQYSTIVKD |
| | | | | | | YELQLMT |
| | | | | | | YK |

| | |
|---|---|
| IPI01018834 | Tax_Id = 9606 Gene_Symbol = MACF1 Uncharacterized |
| | protein |

[0714] Protein Group

| | |
|---|---|
| IPI00478226 | Tax_Id = 9606 Gene_Symbol = MACF1 Isoform 5 of |
| | Microtubule-actin cross-linking factor 1, isoforms 1/2/3/5 |

[0715] Peptide Information

| | Obsrv. | | | Start | End | |
|---|---|---|---|---|---|---|
| Calc. Mass | Mass | ±da | ±ppm | Seq. | Seq. | Sequence |
| 870.5229 | 870.5264 | 0.0035 | 4 | 3606 | 3613 | LMALGPIR |
| 870.5229 | 870.5264 | 0.0035 | 4 | 3606 | 3613 | LMALGPIR |
| 1021.5499 | 1021.5289 | −0.021 | −21 | 2530 | 2537 | QQVQFMLK |
| 1021.5499 | 1021.5289 | −0.021 | −21 | 2530 | 2537 | QQVQFMLK |
| 1170.6841 | 1170.6501 | −0.034 | −29 | 3291 | 3300 | VVKAQIQEQK |
| 1187.6201 | 1187.6735 | 0.0534 | 45 | 2736 | 2745 | NCPISAKLER |
| 1187.6201 | 1187.6735 | 0.0534 | 45 | 2736 | 2745 | NCPISAKLER |
| 1225.6497 | 1225.5806 | −0.0691 | −56 | 3828 | 3838 | MPPLIPAEVDK |
| 1232.6117 | 1232.6139 | 0.0022 | 2 | 2638 | 2647 | QQLEETSEIR |
| 1257.6797 | 1257.6626 | −0.0171 | −14 | 1506 | 1516 | QISEQLNALNK |
| 1261.694 | 1261.6564 | −0.0376 | −30 | 380 | 389 | LLEVWIEFGR |
| 1261.694 | 1261.6564 | −0.0376 | −30 | 380 | 389 | LLEVWIEFGR |
| 1287.6791 | 1287.6769 | −0.0022 | −2 | 4532 | 4542 | EKTLLPEDSQK |
| 1320.7271 | 1320.6122 | −0.1149 | −87 | 1870 | 1881 | GDLRFVTISGQK |
| 1320.7271 | 1320.6122 | −0.1149 | −87 | 1870 | 1881 | GDLRFVTISGQK |
| 1406.7386 | 1406.7087 | −0.0299 | −21 | 4517 | 4528 | QPVYDTTIRTGR |
| 1406.7386 | 1406.7087 | −0.0299 | −21 | 4517 | 4528 | QPVYDTTIRTGR |
| 1413.7809 | 1413.825 | 0.0441 | 31 | 3135 | 3146 | ARQEQLELTLGR |
| 1420.7213 | 1420.7378 | 0.0165 | 12 | 2919 | 2930 | TGSLEEMTQRLR |
| 1425.7156 | 1425.8256 | 0.11 | 77 | 869 | 880 | NTISVKAVCDYR |
| 1450.6996 | 1450.6963 | −0.0033 | −2 | 2135 | 2145 | FEQLCLQQQEK |
| 1465.7281 | 1465.7937 | 0.0656 | 45 | 4298 | 4309 | EETYNQLLDKGR |
| 1465.7316 | 1465.7937 | 0.0621 | 42 | 4310 | 4323 | LMLLSRDDSGSG |
| | | | | | | SK |
| 1502.873 | 1502.8854 | 0.0124 | 8 | 380 | 391 | LLEVWIEFGRIK |
| 1532.6785 | 1532.8059 | 0.1274 | 83 | 3761 | 3773 | ELNPEEGEMVEEK |
| 1546.8727 | 1546.7936 | −0.0791 | −51 | 3908 | 3920 | EIKFLDVLELAEK |
| 1713.8728 | 1713.9213 | 0.0485 | 28 | 3102 | 3116 | HMLEEEGTLDLL |
| | | | | | | GLK |
| 1794.9636 | 1794.8539 | −0.1097 | −61 | 4976 | 4991 | QEFIDGILASKFP |
| | | | | | | TTK |
| 1838.8412 | 1839.0062 | 0.165 | 90 | 4830 | 4844 | ALIAEHQTFMEE |
| | | | | | | MTR |
| 1950.9412 | 1950.9768 | 0.0356 | 18 | 4830 | 4845 | ALIAEHQTFMEE |
| | | | | | | MTRK |
| 1966.9362 | 1966.9713 | 0.0351 | 18 | 4830 | 4845 | ALIAEHQTFMEE |
| | | | | | | MTRK |
| 2092.0266 | 2092.0271 | 0.0005 | 0 | 2275 | 2293 | WLKETEGSIPP |
| | | | | | | TETSMSA K |
| 2186.155 | 2186.0493 | −0.1057 | −48 | 1958 | 1978 | LLSDTVASDPG |
| | | | | | | VLQEQLA |
| | | | | | | TTK |
| 2186.155 | 2186.0493 | −0.1057 | −48 | 1958 | 1978 | LLSDTVASDPG |
| | | | | | | VLQEQLA |
| | | | | | | TTK |
| 2200.0632 | 2200.0908 | 0.0276 | 13 | 3885 | 3901 | EIQDKLDQMVF |
| | | | | | | FWEDIK |
| 2233.1135 | 2233.1709 | 0.0574 | 26 | 2441 | 2460 | EALAGLLVTYP |
| | | | | | | NSQEAEN |
| | | | | | | WK |
| 2299.0217 | 2299.2339 | 0.2122 | 92 | 3047 | 3067 | EMFSQLADLDD |
| | | | | | | ELDGMG |
| | | | | | | AIGR |
| | | | | | | FSQQYSTIVKD |
| 2501.2268 | 2501.3357 | 0.1089 | 44 | 1339 | 1358 | YELQLMT |
| | | | | | | YK |

| | |
|---|---|
| IPI00007676 | Tax_Id = 9606 Gene_Symbol = HSD17B12 Estradiol |
| | 17-beta-dehydrogenase 12 |

[0716] Peptide Information

| | | | | Start | End | |
|---|---|---|---|---|---|---|
| Calc. Mass | Obsrv. Mass | ±da | ±ppm | Seq. | Seq. | Sequence |
| 910.4516 | 910.4365 | −0.0151 | −17 | 65 | 72 | SYAEELAK |
| 1170.6517 | 1170.6501 | −0.0016 | −1 | 26 | 35 | ISYSLFTALR |
| 1225.6028 | 1225.5806 | −0.0222 | −18 | 293 | 302 | IVMNMNKSTR |
| 1261.6635 | 1261.6564 | −0.0071 | −6 | 85 | 95 | DKLDQVSSEIK |
| 1261.6635 | 1261.6564 | −0.0071 | −6 | 85 | 95 | DKLDQVSSEIK |
| 1320.7014 | 1320.6122 | −0.0892 | −68 | 157 | 167 | MININILSVCK |
| 1320.7014 | 1320.6122 | −0.0892 | −68 | 157 | 167 | MININILSVCK |
| 1967.1365 | 1966.9713 | −0.1652 | −84 | 224 | 241 | GVFVQSVLPYFV |
| | | | | | | ATKLAK |
| 2691.4065 | 2691.3652 | −0.0413 | −15 | 157 | 179 | MININILSVCKMT |
| | | | | | | QLVLPG |
| | | | | | | MVER |
| 2707.4014 | 2707.4404 | 0.039 | 14 | 157 | 179 | MININILSVCKMT |
| | | | | | | QLVLPG |
| | | | | | | MVER |

| | |
|---|---|
| IPI00021304 | Tax_id = 9606 Gene_Symbol = KRT2 Keratin, type II |
| | cytoskeletal 2 epidermal |

[0717] Peptide Information

| | | | | Start | | |
|---|---|---|---|---|---|---|
| Calc. Mass | Obsrv. Mass | ±da | ±ppm | Seq. | End Seq. | Sequence |
| 910.4152 | 910.4365 | 0.0213 | 23 | 274 | 280 | YEDEINK |
| 985.5789 | 985.5671 | −0.0118 | −12 | 460 | 467 | EDLARLLR |
| 1254.6074 | 1254.6842 | 0.0768 | 61 | 21 | 34 | GFSSGSAVVSGG |
| | | | | | | SR |
| 1287.6111 | 1287.6769 | 0.0658 | 51 | 35 | 45 | RSTSSFSCLSR |
| 1320.5829 | 1320.6122 | 0.0293 | 22 | 46 | 61 | HGGGGGGFGGG |
| | | | | | | GFGSR |
| 1320.5829 | 1320.6122 | 0.0293 | 22 | 46 | 61 | HGGGGGGFGGG |
| | | | | | | GFGSR |
| 1740.7057 | 1740.7649 | 0.0592 | 34 | 531 | 550 | GSSSGGGYSS |
| | | | | | | GSSSYGS |
| | | | | | | GGR |
| 1745.8235 | 1745.9114 | 0.0879 | 50 | 422 | 436 | QCKNVQDAIAD |
| | | | | | | AEQR |
| 1838.9144 | 1839.0062 | 0.0918 | 50 | 71 | 92 | SISISVAGGGG |
| | | | | | | GFGAAG |
| | | | | | | GFGGR |
| 2384.2166 | 2384.1665 | −0.0501 | −21 | 468 | 487 | DYQELMNVKLA |
| | | | | | | LDVEIAT |
| | | | | | | YR |

| | |
|---|---|
| IPI00976163 | Tax_id = 9606 Gene_Symbol = LOC731282 hypothetical |
| | protein LOC731282 |

[0718] Peptide Information

| | Obsrv. | | | Start | | |
|---|---|---|---|---|---|---|
| Calc. Mass | Mass | ±da | ±ppm | Seq. | End Seq. | Sequence |
| 856.4747 | 856.5074 | 0.0327 | 38 | 297 | 304 | NPGSLRGR |
| 912.4356 | 912.4548 | 0.0192 | 21 | 170 | 176 | LETHPCR |
| 985.5425 | 985.5671 | 0.0246 | 25 | 9 | 18 | GSIGQSAIPR |
| 1350.7311 | 1350.6978 | −0.0333 | −25 | 119 | 130 | SPCPIRSPLPAR |
| 1745.8929 | 1745.9114 | 0.0185 | 11 | 82 | 98 | ASAPWASLSTR |
| | | | | | | ADSGLR |
| 1901.975 | 1901.9828 | 0.0078 | 4 | 1 | 18 | MSPLETNKGSI |
| | | | | | | GQSAIPR |
| 2384.2722 | 2384.1665 | −0.1057 | −44 | 238 | 259 | ATSASLPQETP |
| | | | | | | FALSVVW |
| | | | | | | APRR |

| | Number of | Name of |
|---|---|---|
| Product | result | protein |
| HemoRAAS | 1 | Tax_Id = 9606 Gene_Symbol = ALB Uncharacterized protein |
| HemoRAAS | 2 | Tax_Id = 9606 Gene_Symbol = ALB Uncharacterized protein |
| FNG | 3 | Tax_Id = 9606 Gene_Symbol = FGG Isoform Gamma-A of |
| | | Fibrinogen gamma chain |
| FNG | 4 | Tax_Id = 9606 Gene_Symbol = FGG Isoform Gamma-A of |
| | | Fibrinogen gamma chain |
| FNG | 5 | Tax_Id = 9606 Gene_Symbol = KRT1 Keratin, type II cytoskeletal 1 |
| IVIG | 6 | Tax_Id = 9606 Gene_Symbol = CFH Isoform 1 of Complement |
| | | factor H |
| IVIG | 7 | NA |
| IVIG | 8 | Tax_Id = 9606 Gene_Symbol = IGHM Full-length cDNA clone |
| | | CS0DD006YL02 of Neuroblastoma of |
| | | Homo |
| IVIG | 9 | Tax_Id = 9606 Gene_Symbol = FGB Fibrinogen beta chain |
| IVIG | 10 | Tax_Id = 9606 Gene_Symbol = APOA1 Apolipoprotein A-I |
| AFCC | 11 | Tax_Id = 9606 Gene_Symbol = C3 Complement C3 (Fragment) |
| Fr 3-2 | 12 | Tax_Id = 9606 Gene_Symbol = ALB Uncharacterized protein |
| Fr3 | 13 | Tax_Id = 9606 Gene_Symbol = FGB Fibrinogen beta chain |
| AFCC | 14 | Tax_Id = 9606 Gene_Symbol = FGB Fibrinogen beta chain |
| FS-TB | 15 | Tax_Id = 9606 Gene_Symbol = IGHV4-31; IGHG1 Putative |
| | | uncharacterized protein DKFZp686P15220 |
| Fr3 | 16 | Tax_Id = 9606 Gene_Symbol = FGB fibrinogen beta chain isoform |
| | | 2 preproprotein |
| FS-TB | 17 | Tax_Id = 9606 Gene_Symbol = FGG Isoform Gamma-A of |
| AFOD | 18 | Tax_Id = 9606 Gene_Symbol = TF Serotransferrin |
| AFOD | 19 | Tax_Id = 9606 Gene_Symbol = ACTC1 Actin, alpha cardiac |
| | | muscle 1 |
| AFOD | 20 | Tax_Id = 9606 Gene_Symbol = APOA1 Apolipoprotein A-I |
| HA | 21 | Tax_Id = 9606 Gene_Symbol = ACTC1 Actin, alpha cardiac |
| | | muscle 1 |
| IVIG | 22 | Tax_Id = 9606 Gene_Symbol = IGHV4-31; IGHG1 Putative |
| | | uncharacterized protein DKFZp686G11190 |
| FS-FNG | 23 | Tax_Id = 9606 Gene_Symbol = ACTG1 cDNA FLJ57283, |
| | | highly similar to Actin, |
| | | cytoplasmic 2 |
| FS-TB | 24 | Tax_Id = 9606 Gene_Symbol = HRG Histidine-rich glycoprotein |
| FS-TB | 25 | Tax_Id = 9606 Gene_Symbol = HRG Histidine-rich glycoprotein |
| AFCC | 26 | Tax_Id = 9606 Gene_Symbol = ALB 23 kDa protein |

P12008

| No. | sample | Target# | Success |
|---|---|---|---|
| 1 | 1-76 | L1 | Y |
| 2 | 1-79 | L2 | Y |
| 3 | 2-66 | L3 | Y |
| 4 | 2-68 | L4 | Y |
| 5 | 2-313 | L5 | Y |
| 6 | 3-281 | L6 | Y |
| 7 | 3-285 | L7 | N |
| 8 | 3-303 | L8 | Y |
| 9 | 3-356 | L9 | Y |
| 10 | 3-419 | L10 | Y |
| 11 | 4-97 | L11 | Y |
| 12 | 4-108 | L12 | Y |
| 13 | 4-114 | L13 | Y |
| 14 | 4-145 | L14 | Y |
| 15 | 4-168 | L15 | Y |
| 16 | 4-136 | L16 | Y |
| 17 | 4-182 | L17 | Y |
| 18 | 6-187 | L19 | Y |
| 19 | 6-213 | L19 | Y |
| 20 | 6-284 | L20 | Y |
| 21 | 10-120 | L21 | Y |
| 22 | 11-234 | L22 | Y |
| 23 | 14-206 | L23 | Y |
| 24 | 17-38 | L24 | Y |
| 25 | 17-42 | M1 | Y |
| 26 | 12-116 | M2 | Y |

| | | Date of | |
|---|---|---|---|
| Database | Number of sequences | fasta file | Dye method |
| IPI_human_v3.87 | 91464 | 2011-10-9 | blue |

[0719] The following are the sequence of these 26 newfound proteins in 2 in HemoRAAS®, 3 in FibroRAAS®, 5 in GammaRAAS®, 3 in AFCC®, 1 in Fraction 3-2, 2 in Fraction 3, 4 in FibingluRAAS® (Thrombin), 1 in FibingluRAAS® (High concentrate Fibrinogen), 3 in AFOD® and 1 in AlbuRAAS® from Human Plasma and their name KH28 through KH52.

[0720] 1—KH28 (SEQ ID NO. KH28)

| 273/L1 | Instr./Gel Origin |
|---|---|
| [1] Sample Project | |
| 20120229 | Instrument Sample |

| | | |
|---|---|---|
| Accession No. | Protein Name | Name |

| | |
|---|---|
| IPI00022434 | Tax_Id = 9606 Gene_Symbol = |
| | ALB Uncharacterized protein |

[0721] Peptide Information

| | Obsrv. | | | Start | | |
|---|---|---|---|---|---|---|
| Calc. Mass | Mass | ±da | ±ppm | Seq. | End Seq. | Sequence |
| 875.5098 | 875.5438 | 0.034 | 39 | 243 | 249 | LSQRFPK |
| 927.4934 | 927.5287 | 0.0353 | 38 | 162 | 168 | YLYEIAR |
| 927.4934 | 927.5287 | 0.0353 | 38 | 162 | 168 | YLYEIAR |
| 960.5625 | 960.5985 | 0.036 | 37 | 427 | 434 | FQNALLVR |
| 1055.5884 | 1055.629 | 0.0406 | 38 | 161 | 168 | KYLYEIAR |
| 1074.5426 | 1074.5784 | 0.0358 | 33 | 206 | 214 | LDELRDE |
| | | | | | | GK |
| 1138.498 | 1138.537 | 0.039 | 34 | 500 | 508 | CCTESLV |
| | | | | | | NR |
| 1149.615 | 1149.6412 | 0.0262 | 23 | 66 | 75 | LVNEVTE |
| | | | | | | FAK |
| 1149.615 | 1149.6412 | 0.0262 | 23 | 66 | 75 | LVNEVTE |
| | | | | | | FAK |
| 1226.6052 | 1226.6315 | 0.0263 | 21 | 35 | 44 | FKDLGEE |
| | | | | | | NFK |
| 1342.6348 | 1342.6599 | 0.0251 | 19 | 570 | 581 | AVMDDFA |
| | | | | | | AFVEK |
| 1342.6348 | 1342.6599 | 0.0251 | 19 | 570 | 581 | AVMDDFA |
| | | | | | | AFVEK |
| 1358.6298 | 1358.6572 | 0.0274 | 20 | 570 | 581 | AVMDDFA |
| | | | | | | AFVEK |
| 1371.5668 | 1371.5984 | 0.0316 | 23 | 187 | 198 | AAFTECC |
| | | | | | | QAADK |
| 1434.5334 | 1434.5642 | 0.0308 | 21 | 106 | 117 | ETYGEMADCC |
| | | | | | | AK |
| 1443.6421 | 1443.6724 | 0.0303 | 21 | 287 | 298 | YICENQDSISSK |
| 1498.5785 | 1498.6459 | 0.0674 | 45 | 76 | 88 | TCVADESAEN |
| | | | | | | CDK |
| 1511.8429 | 1511.8618 | 0.0189 | 13 | 439 | 452 | VPQVSTPTLV |
| | | | | | | EVSR |
| 1546.7968 | 1546.816 | 0.0192 | 12 | 299 | 310 | LKECCEKPLLEK |
| 1552.5978 | 1552.6199 | 0.0221 | 14 | 384 | 396 | CCAAADPHEC |
| | | | | | | YAK |
| 1623.7876 | 1623.8287 | 0.0411 | 25 | 348 | 360 | DVFLGMFLYE |
| | | | | | | YAR |
| 1627.6904 | 1627.7432 | 0.0528 | 32 | 585 | 598 | ADDKETCFAE |
| | | | | | | EGQK |
| 1639.9379 | 1639.9312 | −0.0067 | −4 | 438 | 452 | KVPQVSTPTL |
| | | | | | | VEVSR |
| 1639.9379 | 1639.9312 | −0.0067 | −4 | 438 | 452 | KVPQVSTPTL |
| | | | | | | VEVSR |
| 1657.7527 | 1657.7694 | 0.0167 | 10 | 414 | 426 | QNCELFEQLG |
| | | | | | | EYK |
| 1714.7966 | 1714.822 | 0.0254 | 15 | 118 | 130 | QEPERNECFL |
| | | | | | | QHK |
| 1910.9318 | 1910.9443 | 0.0125 | 7 | 509 | 524 | RPCFSALEVD |
| | | | | | | ETYVPK |
| 1910.9318 | 1910.9443 | 0.0125 | 7 | 509 | 524 | RPCFSALEVD |
| | | | | | | ETYVPK |
| 1932.0372 | 1932.0525 | 0.0153 | 8 | 89 | 105 | SLHTLFGDKL |
| | | | | | | CTVATLR |
| 1996.9294 | 1996.9454 | 0.016 | 8 | 123 | 138 | NECFLQHKDD |
| | | | | | | NPNLPR |
| 2045.0955 | 2045.1028 | 0.0073 | 4 | 397 | 413 | VFDEFKPLVE |
| | | | | | | EPQNLIK |
| 2045.0955 | 2045.1028 | 0.0073 | 4 | 397 | 413 | VFDEFKPLVE |
| | | | | | | EPQNLIK |
| 2086.8376 | 2086.8652 | 0.0276 | 13 | 265 | 281 | VHTECCHGDL |
| | | | | | | LECADDR |
| 2124.9875 | 2124.9919 | 0.0044 | 2 | 187 | 205 | AAFTECCQAA |
| | | | | | | DKAACLLPK |
| 2260.0227 | 2260.0281 | 0.0054 | 2 | 525 | 543 | EFNAETFTFH |
| | | | | | | ADICTLSEK |
| 2545.1665 | 2545.1902 | 0.0237 | 9 | 525 | 545 | EFNAETFTFH |
| | | | | | | ADICTLSEK |
| | | | | | | ER |
| 2545.1665 | 2545.1902 | 0.0237 | 9 | 525 | 545 | EFNAETFTFH |
| | | | | | | ADICTLSEK |
| | | | | | | ER |
| 2585.1177 | 2585.145 | 0.0273 | 11 | 265 | 286 | VHTECCHGDL |
| | | | | | | LECADDR |
| | | | | | | ADLAK |
| 2585.1177 | 2585.145 | 0.0273 | 11 | 265 | 286 | VHTECCHGDL |
| | | | | | | LECADDR |
| | | | | | | ADLAK |
| 2599.2974 | 2599.2307 | −0.0667 | −26 | 414 | 434 | QNCELFEQLG |
| | | | | | | EYKFQNA |
| | | | | | | LLVR |
| 2650.2642 | 2650.2622 | −0.002 | −1 | 139 | 160 | LVRPEVDVMC |
| | | | | | | TAFHDNE |
| | | | | | | ETFLK |
| 2778.3589 | 2778.3748 | 0.0159 | 6 | 139 | 161 | LVRPEVDVMC |
| | | | | | | TAFHDNE |
| | | | | | | ETFLKK |
| 2778.3589 | 2778.3748 | 0.0159 | 6 | 139 | 161 | LVRPEVDVMC |
| | | | | | | TAFHDNE |
| | | | | | | ETFLKK |
| 2794.354 | 2794.363 | 0.009 | 3 | 139 | 161 | LVRPEVDVMC |
| | | | | | | TAFHDNE |
| | | | | | | ETFLKK |
| 2974.3445 | 2974.3828 | 0.0383 | 13 | 311 | 337 | SHCIAEVEND |
| | | | | | | EMPADLPS |
| | | | | | | LAADFVESK |

[0722] 2—KH29 (SEQ ID NO. KH29)

| 274/L2 | Instr./Gel Origin |
|---|---|
| [1] Sample Project | |
| 20120229 | Instrument Sample |

| | | |
|---|---|---|
| Accession No. | Protein Name | Name |

| | |
|---|---|
| IPI00022434 | Tax_Id = 9606 Gene_Symbol = |
| | ALB Uncharacterized protein |

[0723] Peptide Information

| | | | | Start | End | |
|---|---|---|---|---|---|---|
| Calc. Mass | Obsrv. Mass | ±da | ±ppm | Seq. | Seq. | Sequence |
| 875.5098 | 875.5159 | 0.0061 | 7 | 243 | 249 | LSQRFPK |
| 927.4934 | 927.503 | 0.0096 | 10 | 162 | 168 | YLYEIAR |
| 927.4934 | 927.503 | 0.0096 | 10 | 162 | 168 | YLYEIAR |
| 960.5625 | 960.5728 | 0.0103 | 11 | 427 | 434 | FQNALLVR |
| 1019.5785 | 1019.5828 | 0.0043 | 4 | 234 | 242 | AFKAWAVAR |
| 1055.5884 | 1055.6036 | 0.0152 | 14 | 161 | 168 | KYLYEIAR |
| 1074.5426 | 1074.5536 | 0.011 | 10 | 206 | 214 | LDELRDEGK |
| 1083.5946 | 1083.6024 | 0.0078 | 7 | 162 | 169 | YLYEIARR |
| 1138.498 | 1138.4996 | 0.0016 | 1 | 500 | 508 | CCTESLVNR |
| 1149.615 | 1149.6121 | −0.0029 | −3 | 66 | 75 | LVNEVTEFAK |
| 1149.615 | 1149.6121 | −0.0029 | −3 | 66 | 75 | LVNEVTEFAK |
| 1226.6052 | 1226.6 | −0.0052 | −4 | 35 | 44 | FKDLGEENFK |
| 1311.7419 | 1311.7374 | −0.0045 | −3 | 362 | 372 | HPDYSVVLLLR |
| 1342.6348 | 1342.6281 | −0.0067 | −5 | 570 | 581 | AVMDDFAAFVEK |
| 1342.6348 | 1342.6281 | −0.0067 | −5 | 570 | 581 | AVMDDFAAFVEK |
| 1358.6298 | 1358.6241 | −0.0057 | −4 | 570 | 581 | AVMDDFAAFVEK |
| 1371.5668 | 1371.5563 | −0.0105 | −8 | 187 | 198 | AAFTECC |
| | | | | | | QAADK |
| 1434.5334 | 1434.5201 | −0.0133 | −9 | 106 | 117 | ETYGEMA |
| | | | | | | DCCAK |
| 1443.6421 | 1443.639 | −0.0031 | −2 | 287 | 298 | YICENQD |
| | | | | | | SISSK |
| 1450.5283 | 1450.5404 | 0.0121 | 8 | 106 | 117 | ETYGEMA |
| | | | | | | DCCAK |
| 1467.8431 | 1467.8247 | −0.0184 | −13 | 361 | 372 | RHPDYSV |
| | | | | | | VLLLR |
| 1467.8431 | 1467.8247 | −0.0184 | −13 | 361 | 372 | RHPDYSVVLL |
| | | | | | | LR |
| 1511.8429 | 1511.8169 | −0.026 | −17 | 439 | 452 | VPQVSTPTLV |
| | | | | | | EVSR |
| 1546.7968 | 1546.7704 | −0.0264 | −17 | 299 | 310 | LKECCEKPLLEK |
| 1552.5978 | 1552.5833 | −0.0145 | −9 | 384 | 396 | CCAAADPHEC |
| | | | | | | YAK |
| 1552.5978 | 1552.5833 | −0.0145 | −9 | 384 | 396 | CCAAADPHEC |
| | | | | | | YAK |
| 1623.7876 | 1623.7695 | −0.0181 | −11 | 348 | 360 | DVFLGMFLYE |
| | | | | | | YAR |
| 1627.6904 | 1627.7004 | 0.01 | 6 | 585 | 598 | ADDKETCFAE |
| | | | | | | EGQK |
| 1639.9379 | 1639.8976 | −0.0403 | −25 | 438 | 452 | KVPQVSTPTL |
| | | | | | | VEVSR |
| 1639.9379 | 1639.8976 | −0.0403 | −25 | 438 | 452 | KVPQVSTPTL |
| | | | | | | VEVSR |
| 1657.7527 | 1657.7295 | −0.0232 | −14 | 414 | 426 | QNCELFEQLG |
| | | | | | | EYK |
| 1662.7251 | 1662.7451 | 0.02 | 12 | 185 | 198 | YKAAFTECCQ |
| | | | | | | AADK |
| 1714.7966 | 1714.7606 | −0.036 | −21 | 118 | 130 | QEPERNECFL |
| | | | | | | QHK |
| 1910.9318 | 1910.8839 | −0.0479 | −25 | 509 | 524 | RPCFSALEVD |
| | | | | | | ETYVPK |
| 1910.9318 | 1910.8839 | −0.0479 | −25 | 509 | 524 | RPCFSALEVD |
| | | | | | | ETYVPK |
| 1932.0372 | 1931.9843 | −0.0529 | −27 | 89 | 105 | SLHTLFGDKL |
| | | | | | | CTVATLR |
| 1996.9294 | 1996.8815 | −0.0479 | −24 | 123 | 138 | NECFLQHKDD |
| | | | | | | NPNLPR |
| 2045.0955 | 2045.0405 | −0.055 | −27 | 397 | 413 | VFDEFKPLVE |
| | | | | | | EPQNLIK |
| 2045.0955 | 2045.0405 | −0.055 | −27 | 397 | 413 | VFDEFKPLVE |
| | | | | | | EPQNLIK |
| 2086.8376 | 2086.7974 | −0.0402 | −19 | 265 | 281 | VHTECCHGDL |
| | | | | | | LECADDR |
| 2124.9875 | 2124.9387 | −0.0488 | −23 | 187 | 205 | AAFTECCQAA |
| | | | | | | DKAACLLPK |
| 2260.0227 | 2259.9587 | −0.064 | −28 | 525 | 543 | EFNAETFTFH |
| | | | | | | ADICTLSEK |
| 2545.1665 | 2545.1023 | −0.0642 | −25 | 525 | 545 | EFNAETFTFH |
| | | | | | | ADICTLSEK |
| | | | | | | ER |
| 2585.1177 | 2585.0464 | −0.0713 | −28 | 265 | 286 | VHTECCHGDL |
| | | | | | | LECADDR |
| | | | | | | ADLAK |
| 2585.1177 | 2585.0464 | −0.0713 | −28 | 265 | 286 | VHTECCHGDL |
| | | | | | | LECADDR |
| | | | | | | ADLAK |
| 2599.2974 | 2599.1162 | −0.1812 | −70 | 414 | 434 | QNCELFEQLG |
| | | | | | | EYKFQNA |
| | | | | | | LLVR |
| 2650.2642 | 2650.1494 | −0.1148 | −43 | 139 | 160 | LVRPEVDVMC |
| | | | | | | TAFHDNE |
| | | | | | | ETFLK |
| 2778.3589 | 2778.2773 | −0.0816 | −29 | 139 | 161 | LVRPEVDVMC |
| | | | | | | TAFHDNE |
| | | | | | | ETFLKK |
| 2794.354 | 2794.2808 | −0.0732 | −26 | 139 | 161 | LVRPEVDVMC |
| | | | | | | TAFHDNE |

[0724] 3—KH30 (SEQ ID NO. KH30)

| 275/L3 | Instr./Gel Origin |
|---|---|
| [1] Sample Project | |
| 20120229 | Instrument Sample |

| | | |
|---|---|---|
| Accession No. | Protein Name | Name |

| | |
|---|---|
| IPI00219713 | Tax_Id = 9606 Gene_Symbol = |
| | FGG Isoform Gamma-A of |
| | Fibrinogen gamma chain |

[0725] Peptide Information

| | | | | Start | End | |
|---|---|---|---|---|---|---|
| Calc. Mass | Obsrv. Mass | ±da | ±ppm | Seq. | Seq. | Sequence |
| 851.441 | 851.4166 | −0.0244 | −29 | 233 | 238 | NWIQYK |
| 1034.5266 | 1034.5286 | 0.002 | 2 | 293 | 301 | VGPEADKYR |
| 1034.5266 | 1034.5286 | 0.002 | 2 | 293 | 301 | VGPEADKYR |
| 1117.5273 | 1117.5242 | −0.0031 | −3 | 274 | 282 | VELEDWNGR |
| 1117.5273 | 1117.5242 | −0.0031 | −3 | 274 | 282 | VELEDWNGR |
| 1134.5137 | 1134.5151 | 0.0014 | 1 | 283 | 292 | TSTADYAMFK |
| 1150.5085 | 1150.5145 | 0.006 | 5 | 283 | 292 | TSTADYAMFK |
| 1194.4878 | 1194.4874 | −0.0004 | 0 | 32 | 40 | DNCCILDER |
| 1194.4878 | 1194.4874 | −0.0004 | 0 | 32 | 40 | DNCCILDER |
| 1293.7566 | 1293.7542 | −0.0024 | −2 | 189 | 199 | QSGLYFIKPLK |
| 1491.7438 | 1491.7455 | 0.0017 | 1 | 122 | 134 | YEASILTHDSS |
| | | | | | | IR |
| 1491.7438 | 1491.7455 | 0.0017 | 1 | 122 | 134 | YEASILTHDSS |
| | | | | | | IR |
| 1513.7281 | 1513.7213 | −0.0068 | −4 | 135 | 146 | YLQEIYNSNN |
| | | | | | | QK |
| 1513.7281 | 1513.7213 | −0.0068 | −4 | 135 | 146 | YLQEIYNSNN |
| | | | | | | QK |
| 1682.9589 | 1682.9558 | −0.0031 | −2 | 259 | 273 | IHLISTQSAIPY |
| | | | | | | ALR |
| 1682.9589 | 1682.9558 | −0.0031 | −2 | 259 | 273 | IHLISTQSAIPY |
| | | | | | | ALR |
| 1893.9131 | 1893.9062 | −0.0069 | −4 | 383 | 399 | ASTPNGYDNG |
| | | | | | | IIWATWK |
| 1893.9131 | 1893.9062 | −0.0069 | −4 | 383 | 399 | ASTPNGYDNG |
| | | | | | | IIWATWK |
| 2011.908 | 2011.9115 | 0.0035 | 2 | 365 | 382 | CHAGHLNGVY |
| | | | | | | YQGGTYSK |
| 2207.0405 | 2207.0403 | −0.0002 | 0 | 239 | 258 | EGFGHLSPTG |
| | | | | | | TTEFWLG |
| | | | | | | NEK |
| 2207.0405 | 2207.0403 | −0.0002 | 0 | 239 | 258 | EGFGHLSPTG |
| | | | | | | TTEFWLG |
| | | | | | | NEK |
| 2233.0229 | 2233.074 | 0.0511 | 23 | 274 | 292 | VELEDWNGRT |
| | | | | | | STADYAM |
| | | | | | | FK |
| 2417.0789 | 2417.1531 | 0.0742 | 31 | 41 | 61 | FGSYCPTTCG |
| | | | | | | IADFLSTY |
| | | | | | | QTK |
| 2520.2651 | 2520.2407 | −0.0244 | −10 | 89 | 111 | AIQLTYNPDES |
| | | | | | | SKPNMID |
| | | | | | | AATLK |
| 2536.26 | 2536.2615 | 0.0015 | 1 | 89 | 111 | AIQLTYNPDE |
| | | | | | | SSKPNMID |
| | | | | | | AATLK |
| 2536.26 | 2536.2615 | 0.0015 | 1 | 89 | 111 | AIQLTYNPDE |
| | | | | | | SSKPNMID |
| | | | | | | AATLK |
| 2768.3342 | 2768.345 | 0.0108 | 4 | 154 | 177 | VAQLEAQCQE |
| | | | | | | PCKDTVQ |
| | | | | | | IHDITGK |
| 2768.3342 | 2768.345 | 0.0108 | 4 | 154 | 177 | VAQLEAQCQE |
| | | | | | | PCKDTVQ |
| | | | | | | IHDITGK |

[0726] 4—KH31 (SEQ ID NO. KH31)

| 276/L4 | Instr./Gel Origin |
|---|---|
| [1] Sample Project | |
| 20120229 | Instrument Sample |

| | | |
|---|---|---|
| Accession No. | Protein Name | Name |

| | |
|---|---|
| IPI00219713 | Tax_Id = 9606 Gene_Symbol = |
| | FGG Isoform Gamma-A of |
| | Fibrinogen gamma chain |

[0727] Peptide Information

| | | | | Start | End | |
|---|---|---|---|---|---|---|
| Calc. Mass | Obsrv. Mass | ±da | ±ppm | Seq. | Seq. | Sequence |
| 851.441 | 851.4302 | −0.0108 | −13 | 233 | 238 | NWIQYK |
| 1034.5266 | 1034.5197 | −0.0069 | −7 | 293 | 301 | VGPEADKYR |
| 1034.5266 | 1034.5197 | −0.0069 | −7 | 293 | 301 | VGPEADKYR |
| 1117.5273 | 1117.5216 | −0.0057 | −5 | 274 | 282 | VELEDWNGR |
| 1117.5273 | 1117.5216 | −0.0057 | −5 | 274 | 282 | VELEDWNGR |
| 1134.5137 | 1134.5092 | −0.0045 | −4 | 283 | 292 | TSTADYAMFK |
| 1150.5085 | 1150.5099 | 0.0014 | 1 | 283 | 292 | TSTADYAMFK |
| 1194.4878 | 1194.4838 | −0.004 | −3 | 32 | 40 | DNCCILDER |
| 1194.4878 | 1194.4838 | −0.004 | −3 | 32 | 40 | DNCCILDER |
| 1293.7566 | 1293.7471 | −0.0095 | −7 | 189 | 199 | QSGLYFIKPLK |
| 1491.7438 | 1491.7361 | −0.0077 | −5 | 122 | 134 | YEASILTHDSSIR |
| 1491.7438 | 1491.7361 | −0.0077 | −5 | 122 | 134 | YEASILTHDSSIR |
| 1513.7281 | 1513.7198 | −0.0083 | −5 | 135 | 146 | YLQEIYNSNNQK |
| 1513.7281 | 1513.7198 | −0.0083 | −5 | 135 | 146 | YLQEIYNSNNQK |
| 1682.9589 | 1682.9517 | −0.0072 | −4 | 259 | 273 | IHLISTQSAIPYA |
| | | | | | | LR |
| 1682.9589 | 1682.9517 | −0.0072 | −4 | 259 | 273 | IHLISTQSAIPYA |
| | | | | | | LR |
| 1893.9131 | 1893.8938 | −0.0193 | −10 | 383 | 399 | ASTPNGYDNGII |
| | | | | | | WATWK |
| 2011.908 | 2011.9026 | −0.0054 | −3 | 365 | 382 | CHAGHLNGVYY |
| | | | | | | QGGTYSK |
| 2207.0405 | 2207.0486 | 0.0081 | 4 | 239 | 258 | EGFGHLSPTGT |
| | | | | | | TEFWLG |
| | | | | | | NEK |
| | | | | | | NEK |
| | | | | | | FKR |
| | | | | | | QTK |
| | 2520.26 | | | | | AATLK |
| | | | | | | AIQLTYNPDE |
| | | | | | | AATLK |
| | | | | | | AATLK |
| | | | | | | WTVFQK |
| | | | | | | IHDITGK |

[0728] 5—KH32 (SEQ ID NO. KH32)

| | |
|---|---|
| 277/L5 | Instr./Gel Origin |
| [1] Sample Project | |
| 20120229 | |
| | Instrument Sample |

| | | |
|---|---|---|
| Accession No. | Protein Name | Name |

| | |
|---|---|
| IPI00220327 | Tax_Id = 9606 Gene_Symbol = |
| | KRT1 Keratin, type II |
| | cytoskeletal 1 |

[0729] Peptide Information

| | | | | Start | End | |
|---|---|---|---|---|---|---|
| Calc. Mass | Obsrv. Mass | ±da | ±ppm | Seq. | Seq. | Sequence |
| 1033.516 | 1033.528 | 0.012 | 12 | 484 | 492 | TLLEGEESR |
| 1065.5211 | 1065.5406 | 0.0195 | 18 | 356 | 364 | AQYEDIAQK |
| 1065.5211 | 1065.5406 | 0.0195 | 18 | 356 | 364 | AQYEDIAQK |
| 1265.6372 | 1265.6401 | 0.0029 | 2 | 278 | 288 | TNAENEFVTIK |
| 1302.7012 | 1302.6802 | −0.021 | −16 | 393 | 403 | NSKIEISELNR |
| 1302.7152 | 1302.6802 | −0.035 | −27 | 344 | 355 | SLDLDSIIAEVK |
| 1316.5247 | 1316.5283 | 0.0036 | 3 | 258 | 267 | NMQDMVEDYR |
| 1340.6692 | 1340.6746 | 0.0054 | 4 | 365 | 376 | SKAEAESLYQ |
| | | | | | | SK |
| 1357.6958 | 1357.7135 | 0.0177 | 13 | 444 | 455 | LNDLEDALQQ |
| | | | | | | AK |
| 1357.6958 | 1357.7135 | 0.0177 | 13 | 444 | 455 | LNDLEDALQQ |
| | | | | | | AK |
| 1393.7322 | 1393.739 | 0.0068 | 5 | 278 | 289 | TNAENEFVTIKK |
| 1393.7322 | 1393.739 | 0.0068 | 5 | 278 | 289 | TNAENEFVTIKK |
| 1523.7887 | 1523.7927 | 0.004 | 3 | 461 | 472 | LLRDYQELMN |
| | | | | | | TK |
| 1657.793 | 1657.7776 | −0.0154 | −9 | 13 | 29 | SGGGFSSGS |
| | | | | | | AGIINYQR |
| 1985.8943 | 1985.9266 | 0.0323 | 16 | 252 | 267 | LDSELKNMQD |
| | | | | | | MVEDYR |
| 2286.1248 | 2286.1003 | −0.0245 | −11 | 367 | 386 | AEAESLYQSK |
| | | | | | | YEELQITA |
| | | | | | | GR |
| 3312.3083 | 3312.375 | 0.0667 | 20 | 550 | 588 | GSYGSGGSS |
| | | | | | | YGSGGGS |
| | | | | | | YGSGGGGGG |
| | | | | | | HGSYGSG |
| | | | | | | SSSGGYR |
| 3312.3083 | 3312.375 | 0.0667 | 20 | 550 | 588 | GSYGSGGSS |
| | | | | | | YGSGGGS |
| | | | | | | YGSGGGGGG |
| | | | | | | HGSYGSG |
| | | | | | | SSSGGYR |

[0730] 6—KH33 (SEQ ID NO. KH33)

| | |
|---|---|
| 278/L6 | Instr./Gel Origin |
| [1] Sample Project | |
| 20120229 | |
| | Instrument Sample |

| | | |
|---|---|---|
| Accession No. | Protein Name | Name |

| | |
|---|---|
| IPI00029739 | Tax_Id = 9606 Gene_Symbol = |
| | CFH Isoform 1 of Complement |
| | factor H |

[0731] Peptide Information

| | | | | Start | End | |
|---|---|---|---|---|---|---|
| Calc. Mass | Obsrv. Mass | ±da | ±ppm | Seq. | Seq. | Sequence |
| 1063.5895 | 1063.6074 | 0.0179 | 17 | 574 | 582 | IDVHLVPDR |
| 1064.5735 | 1064.5974 | 0.0239 | 22 | 225 | 232 | IIYKENER |
| 1131.5178 | 1131.5262 | 0.0084 | 7 | 770 | 778 | EFDHNSNIR |
| 1133.6466 | 1133.6283 | −0.0183 | −16 | 342 | 351 | RPYFPVAVGK |
| 1141.5605 | 1141.571 | 0.0105 | 9 | 1163 | 1171 | CLHPCVISR |
| 1189.5306 | 1189.551 | 0.0204 | 17 | 897 | 906 | LSYTCEGGFR |
| 1189.5306 | 1189.551 | 0.0204 | 17 | 897 | 906 | LSYTCEGGFR |
| 1194.5386 | 1194.5817 | 0.0431 | 36 | 886 | 896 | SSQESYAHGTK |
| 1213.5531 | 1213.6311 | 0.078 | 64 | 332 | 341 | HGGLYHENMR |
| 1242.542 | 1242.5555 | 0.0135 | 11 | 286 | 295 | TGDEITYQCR |
| 1242.542 | 1242.5555 | 0.0135 | 11 | 286 | 295 | TGDEITYQCR |
| 1245.6045 | 1245.6077 | 0.0032 | 3 | 309 | 319 | CTSTGWIPAPR |
| 1259.6453 | 1259.646 | 0.0007 | 1 | 858 | 867 | WQSIPLCVEK |
| 1262.5835 | 1262.6198 | 0.0363 | 29 | 497 | 507 | DGWSAQPTCIK |
| 1309.6028 | 1309.6433 | 0.0405 | 31 | 508 | 518 | SCDIPVFMNAR |
| 1309.6028 | 1309.6433 | 0.0405 | 31 | 508 | 518 | SCDIPVFMNAR |
| 1311.6362 | 1311.6445 | 0.0083 | 6 | 1193 | 1203 | TGESVEFVCKR |
| 1325.5977 | 1325.6309 | 0.0332 | 25 | 508 | 518 | SCDIPVFMNAR |
| 1325.5977 | 1325.6309 | 0.0332 | 25 | 508 | 518 | SCDIPVFMNAR |
| 1381.678 | 1381.6797 | 0.0017 | 1 | 1172 | 1182 | EIMENYNIALR |
| | 1381.6797 | | | | | |
| 1395.7842 | 1395.7526 | −0.0316 | −23 | 755 | 766 | SSNLIILEEHLK |
| 1527.7625 | 1527.785 | 0.0225 | 15 | 411 | 424 | SIDVACHPGY |
| | | | | | | ALPK |
| 1654.7418 | 1654.7844 | 0.0426 | 26 | 1010 | 1023 | AGEQVTYTCA |
| | | | | | | TYYK |
| 1851.9421 | 1851.947 | 0.0049 | 3 | 1172 | 1186 | EIMENYNIALR |
| | | | | | | WTAK |
| 1851.9421 | 1851.947 | 0.0049 | 3 | 1172 | 1186 | EIMENYNIALR |
| | | | | | | WTAK |
| 1867.828 | 1867.9028 | 0.0748 | 40 | 266 | 281 | SCDNPYIPNG |
| | | | | | | DYSPLR |
| 1867.9371 | 1867.9028 | −0.0343 | −18 | 1172 | 1186 | EIMENYNIALR |
| | | | | | | WTAK |
| 1965.9698 | 1966.0179 | 0.0481 | 24 | 625 | 642 | EQVQSCGPPP |
| | | | | | | ELLNGNV K |
| 2020.9757 | 2020.9901 | 0.0144 | 7 | 1045 | 1062 | DTSCVNPPTV |
| | | | | | | QNAYIVSR |
| 2020.9869 | 2020.9901 | 0.0032 | 2 | 868 | 885 | IPCSQPPQIEH |
| | | | | | | GTINSSR |
| 2057.8811 | 2057.9634 | 0.0823 | 40 | 389 | 404 | CYFPYLENGY |
| | | | | | | NQNYGR |
| 2150.937 | 2150.9851 | 0.0481 | 22 | 128 | 145 | ECDTDGWTN |
| | | | | | | DIPICEVVK |
| 2163.0176 | 2163.0195 | 0.0019 | 1 | 110 | 127 | AVYTCNEGYQ |
| | | | | | | LLGEINYR |
| 2192.0554 | 2192.0154 | −0.04 | −18 | 157 | 175 | IVSSAMEPDR |
| | | | | | | EYHFGQA VR |
| 2208.0503 | 2208.0881 | 0.0378 | 17 | 157 | 175 | IVSSAMEPDR |
| | | | | | | EYHFGQA |
| | | | | | | VR |
| 2259.9976 | 2260.0339 | 0.0363 | 16 | 645 | 662 | TKEEYGHSEV |
| | | | | | | VEYYCNPR |
| 2259.9976 | 2260.0339 | 0.0363 | 16 | 645 | 662 | TKEEYGHSEV |
| | | | | | | VEYYCNPR |

[0732] 7—KH34 (SEQ ID NO. KH34)

| | |
|---|---|
| 279/L7 | Instr./Gel Origin |
| [1] Sample Project | |
| 20120229 | |
| | Instrument Sample |

| | | |
|---|---|---|
| Accession No. | Protein Name | Name |

| | |
|---|---|
| IPI00384853 | Tax_Id = 9606 Gene_Symbol = - |
| | Conserved hypothetical protein |

[0733] Peptide Information

| | | | | Start | End | |
|---|---|---|---|---|---|---|
| Calc. Mass | Obsrv. Mass | ±da | ±ppm | Seq. | Seq. | Sequence |
| 1262.6344 | 1262.5671 | −0.0673 | −53 | 100 | 110 | CLVGAQCVLSR |
| 1302.5719 | 1302.6827 | 0.1108 | 85 | 64 | 74 | CSAGAQFVFCR |
| 1320.6324 | 1320.6317 | −0.0007 | −1 | 76 | 88 | SAGAACTQQAL |
| | | | | | | SR |
| 1323.6145 | 1323.6329 | 0.0184 | 14 | 125 | 135 | CTVCTQQALSR |
| 1458.673 | 1458.7278 | 0.0548 | 38 | 64 | 75 | CSAGAQFVFCRR |
| 1851.849 | 1851.9384 | 0.0894 | 48 | 59 | 74 | QAHGRCSAGA |
| | | | | | | QFVFCR |
| 1851.849 | 1851.9384 | 0.0894 | 48 | 59 | 74 | QAHGRCSAGA |
| | | | | | | QFVFCR |

[0734] 8—KH35 (SEQ ID NO. KH35)

| | |
|---|---|
| 280/L8 | Instr./Gel Origin |
| [1] Sample Project | |
| 20120229 | |
| | Instrument Sample |

| | | |
|---|---|---|
| Accession No. | Protein Name | Name |

| | |
|---|---|
| IPI00479708 | Tax_Id = 9606 Gene_Symbol = |
| | IGHM Full-length cDNA clone |
| | CS0DD006YL02 of Neuro- |
| | blastoma of Homo sapiens |

[0735] Peptide Information

| | | | | Start | End | |
|---|---|---|---|---|---|---|
| Calc. Mass | Obsrv. Mass | ±da | ±ppm | Seq. | Seq. | Sequence |
| 900.5302 | 900.5189 | −0.0113 | −13 | 35 | 42 | VSVFVPPR |
| 909.4213 | 909.4136 | −0.0077 | −8 | 43 | 50 | DGFFGNPR |
| 909.4213 | 909.4136 | −0.0077 | −8 | 43 | 50 | DGFFGNPR |
| 1029.584 | 1029.5831 | −0.0009 | −1 | 65 | 72 | QIQVSWLR |
| 1029.584 | 1029.5831 | −0.0009 | −1 | 65 | 72 | QIQVSWLR |
| 1249.6359 | 1249.6318 | −0.0041 | −3 | 54 | 64 | LICQATGFSPR |
| 1249.6359 | 1249.6318 | −0.0041 | −3 | 54 | 64 | LICQATGFSPR |
| 1386.8356 | 1386.8224 | −0.0132 | −10 | 22 | 34 | NVPLPVIAELPPK |
| 1464.7628 | 1464.7626 | −0.0002 | 0 | 52 | 64 | SKLICQATGFSPR |
| 1600.7788 | 1600.7754 | −0.0034 | −2 | 299 | 313 | YVTSAPMPEPQ |
| | | | | | | APGR |
| 1600.7788 | 1600.7754 | −0.0034 | −2 | 299 | 313 | YVTSAPMPEPQ |
| | | | | | | APGR |
| 1616.7738 | 1616.7579 | −0.0159 | −10 | 299 | 313 | YVTSAPMPEPQ |
| | | | | | | APGR |
| 1616.7738 | 1616.7579 | −0.0159 | −10 | 299 | 313 | YVTSAPMPEPQ |
| | | | | | | APGR |
| 1646.6938 | 1646.7057 | 0.0119 | 7 | 108 | 120 | ESDWLSQSMFT |
| | | | | | | CR |
| 1646.6938 | 1646.7057 | 0.0119 | 7 | 108 | 120 | ESDWLSQSMFT |
| | | | | | | CR |
| 1662.6887 | 1662.7025 | 0.0138 | 8 | 108 | 120 | ESDWLSQSMFT |
| | | | | | | CR |
| 1662.6887 | 1662.7025 | 0.0138 | 8 | 108 | 120 | ESDWLSQSMFT |
| | | | | | | CR |
| 1716.8627 | 1716.8518 | −0.0109 | −6 | 223 | 237 | FTCTVTHTDLPS |
| | | | | | | PLK |
| 1774.0123 | 1773.9991 | −0.0132 | −7 | 245 | 260 | GVALHRPDV |
| | | | | | | YLLPPAR |
| 1774.0123 | 1773.9991 | −0.0132 | −7 | 245 | 260 | GVALHRPDVY |
| | | | | | | LLPPAR |
| 1790.9337 | 1790.9369 | 0.0032 | 2 | 35 | 50 | VSVFVPPRDG |
| | | | | | | FFGNPR |
| 1931.9669 | 1931.9622 | −0.0047 | −2 | 73 | 91 | EGKQVGSGVT |
| | | | | | | TDQVQAE |
| | | | | | | AK |
| 2453.2129 | 2453.2119 | −0.001 | 0 | 291 | 313 | GQPLSPEKYV |
| | | | | | | TSAPMPE |
| | | | | | | PQAPGR |

[0736] 9—KH36 (SEQ ID NO. KH36)

| | |
|---|---|
| 281/L9 | Instr./Gel Origin |
| [1] Sample Project | |
| 20120229 | |
| | Instrument Sample |

| | | |
|---|---|---|
| Accession No. | Protein Name | Name |

| | |
|---|---|
| IPI00298497 | Tax_Id = 9606 Gene_Symbol = |
| | FGB Fibrinogen beta chain |

[0737] Peptide Information

| | | | | Start | | |
|---|---|---|---|---|---|---|
| Calc. Mass | Obsrv. Mass | ±da | ±ppm | Seq. | End Seq. | Sequence |
| 844.4886 | 844.4984 | 0.0098 | 12 | 200 | 206 | SILENLR |
| 886.3876 | 886.3976 | 0.01 | 11 | 472 | 478 | GSWYSMR |
| 980.4432 | 980.4614 | 0.0182 | 19 | 286 | 294 | QDGSVDFGR |
| 1032.5626 | 1032.5872 | 0.0246 | 24 | 484 | 491 | IRPFFPQQ |
| 1032.5626 | 1032.5872 | 0.0246 | 24 | 484 | 491 | IRPFFPQQ |
| 1239.5178 | 1239.558 | 0.0402 | 32 | 427 | 436 | EDGGGWWYNR |
| 1239.5178 | 1239.558 | 0.0402 | 32 | 427 | 436 | EDGGGWWYNR |
| 1275.5601 | 1275.6143 | 0.0542 | 42 | 411 | 421 | DNDGWLTSDPR |
| 1535.7238 | 1535.7637 | 0.0399 | 26 | 354 | 367 | AHYGGFTVQNE |
| | | | | | | ANK |
| 1544.6952 | 1544.7599 | 0.0647 | 42 | 459 | 471 | HGTDDGVVWM |
| | | | | | | NWK |
| 1560.6901 | 1560.7675 | 0.0774 | 50 | 459 | 471 | HGTDDGVVWM |
| | | | | | | NWK |
| 1587.6777 | 1587.7399 | 0.0622 | 39 | 212 | 224 | LESDVSAQMEY |
| | | | | | | CR |
| 1603.6727 | 1603.744 | 0.0713 | 44 | 212 | 224 | LESDVSAQMEY |
| | | | | | | CR |
| 1618.7928 | 1618.8191 | 0.0263 | 16 | 225 | 239 | TPCTVSCNIPVV |
| | | | | | | SGK |
| 1668.7152 | 1668.7885 | 0.0733 | 44 | 446 | 458 | YYWGGQYTWD |
| | | | | | | MAK |
| 1684.7101 | 1684.7656 | 0.0555 | 33 | 446 | 458 | YYWGGQYTWD |
| | | | | | | MAK |
| 1742.734 | 1742.7931 | 0.0591 | 34 | 423 | 436 | QCSKEDGGGW |
| | | | | | | WYNR |
| 1742.734 | 1742.7931 | 0.0591 | 34 | 423 | 436 | QCSKEDGGGW |
| | | | | | | WYNR |
| 1785.7902 | 1785.8638 | 0.0736 | 41 | 314 | 328 | NYCGLPGEYWL |
| | | | | | | GNDK |
| 1951.0032 | 1951.0822 | 0.079 | 40 | 54 | 72 | EEAPSLRPAPP |
| | | | | | | PISGGGYR |
| 1951.0032 | 1951.0822 | 0.079 | 40 | 54 | 72 | EEAPSLRPAP |
| | | | | | | PPISGGGYR |
| 1956.9154 | 1957.0085 | 0.0931 | 48 | 209 | 224 | IQKLESDVSA |
| | | | | | | QMEYCR |
| 1972.9103 | 1973.0043 | 0.094 | 48 | 209 | 224 | IQKLESDVSA |
| | | | | | | QMEYCR |
| 2107.1042 | 2107.2041 | 0.0999 | 47 | 53 | 72 | REEAPSLRPA |
| | | | | | | PPPISGGG YR |
| 2127.083 | 2127.1501 | 0.0671 | 32 | 179 | 196 | HQLYIDETVNS |
| | | | | | | NIPTNLR |
| | 2127.1501 | | | | | |
| 2156.9487 | 2157.0571 | 0.1084 | 50 | 268 | 285 | VYCDMNTENG |
| | | | | | | GWTVIQN R |
| 2156.9487 | 2157.0571 | 0.1084 | 50 | 268 | 285 | VYCDMNTEN |
| | | | | | | GGWTVIQN R |
| 2172.9438 | 2173.0884 | 0.1446 | 67 | 268 | 285 | VYCDMNTEN |
| | | | | | | GGWTVIQN R |
| 2257.0806 | 2257.1973 | 0.1167 | 52 | 248 | 267 | GGETSEMYLI |
| | | | | | | QPDSSVKP |
| | | | | | | YR |
| 2257.0806 | 2257.1973 | 0.1167 | 52 | 248 | 267 | GGETSEMYLI |
| | | | | | | QPDSSVKP |
| | | | | | | YR |
| 2273.0754 | 2273.1951 | 0.1197 | 53 | 248 | 267 | GGETSEMYLI |
| | | | | | | QPDSSVKP |
| | | | | | | YR |
| 2368.168 | 2368.2822 | 0.1142 | 48 | 354 | 374 | AHYGGFTVQN |
| | | | | | | EANKYQI |
| | | | | | | SVNK |
| 2385.1755 | 2385.2944 | 0.1189 | 50 | 247 | 267 | KGGETSEMYL |
| | | | | | | IQPDSSVK |
| | | | | | | PYR |
| 2385.1755 | 2385.2944 | 0.1189 | 50 | 247 | 267 | KGGETSEMYL |
| | | | | | | IQPDSSVK |
| | | | | | | PYR |
| 2401.1704 | 2401.3027 | 0.1323 | 55 | 247 | 267 | KGGETSEMYL |
| | | | | | | IQPDSSVK |
| | | | | | | PYR |
| 2484.1978 | 2484.3455 | 0.1477 | 59 | 314 | 334 | NYCGLPGEY |
| | | | | | | WLGNDKIS |
| | | | | | | QLTR |
| 2548.2205 | 2548.3574 | 0.1369 | 54 | 225 | 246 | TPCTVSCNIPV |
| | | | | | | VSGKECE |
| | | | | | | EIIR |
| 2548.2205 | 2548.3574 | 0.1369 | 54 | 225 | 246 | TPCTVSCNIPV |
| | | | | | | VSGKECE |
| | | | | | | EIIR |

[0738] 10—KH37 (SEQ ID NO. KH37)

| | |
|---|---|
| 282/L10 | Instr./Gel Origin |
| [1] Sample Project | |
| 20120229 | |
| | Instrument Sample |

| | | |
|---|---|---|
| Accession No. | Protein Name | Name |

| | |
|---|---|
| IPI00021841 | Tax_Id = 9606 Gene_Symbol = |
| | APOA1 Apolipoprotein A-I |

[0739] Peptide Information

| | Obsrv. | | | Start | End | |
|---|---|---|---|---|---|---|
| Calc. Mass | Mass | ±da | ±ppm | Seq. | Seq. | Sequence |
| 1012.5786 | 1012.5571 | −0.0215 | −21 | 231 | 239 | AKPALEDLR |
| 1031.519 | 1031.5276 | 0.0086 | 8 | 165 | 173 | LSPLGEEMR |
| 1152.6372 | 1152.6154 | −0.0218 | −19 | 156 | 164 | QKLHELQEK |
| 1215.6216 | 1215.6481 | 0.0265 | 22 | 220 | 230 | ATEHLSTLSEK |
| 1230.7092 | 1230.7098 | 0.0006 | 0 | 240 | 250 | QGLLPVLESFK |
| 1235.6882 | 1235.66 | −0.0282 | −23 | 37 | 47 | DLATVYVDVLK |
| 1252.6208 | 1252.6462 | 0.0254 | 20 | 121 | 130 | VQPYLDDFQK |
| 1283.5725 | 1283.597 | 0.0245 | 19 | 132 | 140 | WQEEMELYR |
| 1283.5725 | 1283.597 | 0.0245 | 19 | 132 | 140 | WQEEMELYR |
| 1299.5674 | 1299.6086 | 0.0412 | 32 | 132 | 140 | WQEEMELYR |
| 1301.6484 | 1301.6685 | 0.0201 | 15 | 185 | 195 | THLAPYSDELR |
| 1301.6484 | 1301.6685 | 0.0201 | 15 | 185 | 195 | THLAPYSDELR |
| 1318.642 | 1318.6667 | 0.0247 | 19 | 165 | 175 | LSPLGEEMRDR |
| 1318.642 | 1318.6667 | 0.0247 | 19 | 165 | 175 | LSPLGEEMRDR |
| 1323.621 | 1323.6504 | 0.0294 | 22 | 102 | 112 | ETEGLRQEMSK |
| 1380.7158 | 1380.7335 | 0.0177 | 13 | 121 | 131 | VQPYLDDFQKK |
| 1380.7158 | 1380.7335 | 0.0177 | 13 | 121 | 131 | VQPYLDDFQKK |
| 1386.7152 | 1386.7363 | 0.0211 | 15 | 251 | 262 | VSFLSALEEY |
| | | | | | | TK |
| 1400.6693 | 1400.7068 | 0.0375 | 27 | 52 | 64 | DYVSQFEGSA |
| | | | | | | LGK |
| 1400.6693 | 1400.7068 | 0.0375 | 27 | 52 | 64 | DYVSQFEGSA |
| | | | | | | LGK |
| 1411.6675 | 1411.7057 | 0.0382 | 27 | 131 | 140 | KWQEEMELYR |
| 1427.6624 | 1427.7134 | 0.051 | 36 | 131 | 140 | KWQEEMELYR |
| 1451.7529 | 1451.7086 | −0.0443 | −31 | 119 | 130 | AKVQPYLDDF |
| | | | | | | QK |
| 1462.8516 | 1462.876 | 0.0244 | 17 | 35 | 47 | VKDLATVYVD |
| | | | | | | VLK |
| 1467.7914 | 1467.8289 | 0.0375 | 26 | 143 | 155 | VEPLRAELQE |
| | | | | | | GAR |
| 1467.7914 | 1467.8289 | 0.0375 | 26 | 143 | 155 | VEPLRAELQE |
| | | | | | | GAR |
| 1539.7261 | 1539.7433 | 0.0172 | 11 | 132 | 142 | WQEEMELYR |
| | | | | | | QK |
| 1612.7854 | 1612.8112 | 0.0258 | 16 | 70 | 83 | LLDNWDSVTS |
| | | | | | | TFSK |
| 1650.8698 | 1650.9153 | 0.0455 | 28 | 37 | 51 | DLATVYVDVL |
| | | | | | | KDSGR |
| 1815.8508 | 1815.8988 | 0.048 | 26 | 48 | 64 | DSGRDYVSQ |
| | | | | | | FEGSALGK |
| 1815.8508 | 1815.8988 | 0.048 | 26 | 48 | 64 | DSGRDYVSQ |
| | | | | | | FEGSALGK |
| 1932.9338 | 1933.0148 | 0.081 | 42 | 86 | 101 | EQLGPVTQEF |
| | | | | | | WDNLEK |
| 2202.1189 | 2202.2029 | 0.084 | 38 | 84 | 101 | LREQLGPVTQ |
| | | | | | | EFWDNLEK |

[0740] 11—KH38 (SEQ ID NO. KH38)

| | |
|---|---|
| 283/L11 | Instr./Gel Origin |
| [1] Sample Project | |
| 20120229 | |
| | Instrument Sample |

| | | |
|---|---|---|
| Accession No. | Protein Name | Name |

| | |
|---|---|
| IPI00783987 | Tax_Id = 9606 Gene_Symbol = |
| | C3 Complement C3 (Fragment) |

[0741] Peptide Information

| | | | | Start | End | |
|---|---|---|---|---|---|---|
| Calc. Mass | Obsrv. Mass | ±da | ±ppm | Seq. | Seq. | Sequence |
| 842.5345 | 842.4744 | −0.0601 | −71 | 593 | 600 | VVLVAVDK |
| 854.4115 | 854.4087 | −0.0028 | −3 | 585 | 592 | IEGDHGAR |
| 888.4825 | 888.4628 | −0.0197 | −22 | 616 | 622 | IWDVVEK |
| 959.5407 | 959.5392 | −0.0015 | −2 | 1592 | 1599 | EALKLEEK |
| 1042.6255 | 1042.6213 | −0.0042 | −4 | 282 | 290 | ISLPESLKR |
| 1110.6266 | 1110.6171 | −0.0095 | −9 | 306 | 315 | VLLDGVQNPR |
| 1139.5408 | 1139.5358 | −0.005 | −4 | 242 | 249 | FYYIYNEK |
| 1208.6021 | 1208.6031 | 0.001 | 1 | 489 | 497 | YYTYLIMNK |
| 1224.5969 | 1224.5972 | 0.0003 | 0 | 489 | 497 | YYTYLIMNK |
| 1238.7216 | 1238.7168 | −0.0048 | −4 | 305 | 315 | KVLLDGVQNPR |
| 1238.7216 | 1238.7168 | −0.0048 | −4 | 305 | 315 | KVLLDGVQNPR |
| 1345.6998 | 1345.6907 | −0.0091 | −7 | 545 | 556 | EVVADSVWVDVK |
| 1370.7314 | 1370.7313 | −0.0001 | 0 | 137 | 148 | TIYTPGSTVLYR |
| 1370.7314 | 1370.7313 | −0.0001 | 0 | 137 | 148 | TIYTPGSTVLYR |
| 1389.6969 | 1389.6991 | 0.0022 | 2 | 428 | 439 | KQELSEAEQATR |
| 1470.7799 | 1470.776 | −0.0039 | −3 | 291 | 304 | IPIEDGSGEVVL |
| | | | | | | SR |
| 1470.7799 | 1470.776 | −0.0039 | −3 | 291 | 304 | IPIEDGSGEVVL |
| | | | | | | SR |
| 1477.7872 | 1477.7933 | 0.0061 | 4 | 487 | 497 | IRYYTYLIMNK |
| 1511.8217 | 1511.8231 | 0.0014 | 1 | 531 | 544 | LVAYYTLIGASG |
| | | | | | | QR |
| 1511.8217 | 1511.8231 | 0.0014 | 1 | 531 | 544 | LVAYYTLIGASG |
| | | | | | | QR |
| 1598.8749 | 1598.8751 | 0.0002 | 0 | 291 | 305 | IPIEDGSGEVVL |
| | | | | | | SRK |
| 1626.881 | 1626.8781 | −0.0029 | −2 | 290 | 304 | RIPIEDGSGEVV |
| | | | | | | LSR |
| 1639.8724 | 1639.8807 | 0.0083 | 5 | 162 | 176 | TVMVNIENPEGI |
| | | | | | | PVK |
| 1787.9691 | 1787.9709 | 0.0018 | 1 | 344 | 359 | SGIPIVTSPYQIH |
| | | | | | | FTK |
| 1787.9691 | 1787.9709 | 0.0018 | 1 | 344 | 359 | SGIPIVTSPYQIH |
| | | | | | | FTK |
| 1823.0022 | 1823.0173 | 0.0151 | 8 | 306 | 322 | VLLDGVQNPR |
| | | | | | | AEDLVGK |
| 1841.9908 | 1841.8628 | −0.128 | −69 | 1463 | 1478 | VHQYFNVELI |
| | | | | | | QPGAVK |
| 1865.9393 | 1865.9467 | 0.0074 | 4 | 265 | 281 | VEGTAFVIFGI |
| | | | | | | QDGEQR |
| 1872.0338 | 1872.0364 | 0.0026 | 1 | 463 | 478 | TELRPGETLN |
| | | | | | | VNFLLR |
| 1872.0338 | 1872.0364 | 0.0026 | 1 | 463 | 478 | TELRPGETLN |
| | | | | | | VNFLLR |
| 1878.9735 | 1878.9792 | 0.0057 | 3 | 226 | 241 | EYVLPSFEVIV |
| | | | | | | EPTEK |
| 1891.076 | 1891.0774 | 0.0014 | 1 | 409 | 425 | LSINTHPSQKP |
| | | | | | | LSITVR |
| 1891.076 | 1891.0774 | 0.0014 | 1 | 409 | 425 | LSINTHPSQKP |
| | | | | | | LSITVR |
| 1913.0314 | 1913.0513 | 0.0199 | 10 | 1186 | 1203 | SYTVAIAGYAL |
| | | | | | | AQMGRLK |
| 1985.9709 | 1985.9758 | 0.0049 | 2 | 567 | 584 | SGQSEDRQP |
| | | | | | | VPGQQMT |
| | | | | | | LK |
| 1985.9709 | 1985.9758 | 0.0049 | 2 | 567 | 584 | SGQSEDRQP |
| | | | | | | VPGQQMT |
| | | | | | | LK |
| 2001.9658 | 2001.972 | 0.0062 | 3 | 567 | 584 | SGQSEDRQP |
| | | | | | | VPGQQMT |
| | | | | | | LK |
| 2166.0027 | 2166.0095 | 0.0068 | 3 | 208 | 225 | AYYENSPQQV |
| | | | | | | FSTEFEVK |
| 2198.1301 | 2198.1296 | −0.0005 | 0 | 387 | 408 | VPVAVQGEDT |
| | | | | | | VQSLTQG |
| | | | | | | DGVAK |
| 2390.2273 | 2390.239 | 0.0117 | 5 | 545 | 566 | EVVADSVWVD |
| | | | | | | VKDSCVG |
| | | | | | | SLVVK |
| 2444.3071 | 2444.343 | 0.0359 | 15 | 509 | 530 | EPGQDLVVLP |
| | | | | | | LSITTDFIP |
| | | | | | | SFR |
| 2494.1482 | 2494.2024 | 0.0542 | 22 | 634 | 657 | DYAGVFSDAG |
| | | | | | | LTFTSSS |
| | | | | | | GQQTAQR |
| 2578.3083 | 2578.3513 | 0.043 | 17 | 440 | 462 | TMQALPYSTV |
| | | | | | | GNSNNYL |
| | | | | | | HLSVLR |
| 2594.3032 | 2594.3254 | 0.0222 | 9 | 440 | 462 | TMQALPYSTV |
| | | | | | | GNSNNYL |
| | | | | | | HLSVLR |
| 3378.6523 | 3378.7566 | 0.1043 | 31 | 36 | 66 | LESEETMVLE |
| | | | | | | AHDAQGD |
| | | | | | | VPVTVTVHDF |
| | | | | | | PGKK |
| 3537.6187 | 3537.7158 | 0.0971 | 27 | 623 | 657 | ADIGCTPGSG |
| | | | | | | KDYAGVF |
| | | | | | | SDAGLTFTSS |
| | | | | | | SGQQTAQR |

[0742] 12—KH39 (SEQ ID NO. KH39)

| | |
|---|---|
| 284/L12 | Instr./Gel Origin |
| [1] Sample Project | |
| 20120229 | |
| | Instrument Sample |

| | | |
|---|---|---|
| Accession No. | Protein Name | Name |

| | |
|---|---|
| IPI00022434 | Tax_Id = 9606 Gene_Symbol = |
| | ALB Uncharacterized protein |

[0743] Peptide Information

| | Obsrv. | | | Start | End | |
|---|---|---|---|---|---|---|
| Calc. Mass | Mass | ±da | ±ppm | Seq. | Seq. | Sequence |
| 875.5098 | 875.4982 | −0.0116 | −13 | 243 | 249 | LSQRFPK |
| 927.4934 | 927.4836 | −0.0098 | −11 | 162 | 168 | YLYEIAR |
| 927.4934 | 927.4836 | −0.0098 | −11 | 162 | 168 | YLYEIAR |
| 960.5625 | 960.5525 | −0.01 | −10 | 427 | 434 | FQNALLVR |
| 1055.5884 | 1055.5841 | −0.0043 | −4 | 161 | 168 | KYLYEIAR |
| | 1055.5841 | | | | | |
| 1074.5426 | 1074.5417 | −0.0009 | −1 | 206 | 214 | LDELRDEGK |
| 1138.498 | 1138.4924 | −0.0056 | −5 | 500 | 508 | CCTESLVNR |
| 1149.615 | 1149.6042 | −0.0108 | −9 | 66 | 75 | LVNEVTEFAK |
| 1149.615 | 1149.6042 | −0.0108 | −9 | 66 | 75 | LVNEVTEFAK |
| 1226.6052 | 1226.5979 | −0.0073 | −6 | 35 | 44 | FKDLGEENFK |
| 1311.7419 | 1311.7471 | 0.0052 | 4 | 362 | 372 | HPDYSVVLLLR |
| 1342.6348 | 1342.6254 | −0.0094 | −7 | 570 | 581 | AVMDDFAAFVEK |
| 1342.6348 | 1342.6254 | −0.0094 | −7 | 570 | 581 | AVMDDFAAFVEK |
| 1358.6298 | 1358.6239 | −0.0059 | −4 | 570 | 581 | AVMDDFAAFVEK |
| 1371.5668 | 1371.5664 | −0.0004 | 0 | 187 | 198 | AAFTECCQAADK |
| 1434.5334 | 1434.5306 | −0.0028 | −2 | 106 | 117 | ETYGEMADCCAK |
| 1443.6421 | 1443.6412 | −0.0009 | −1 | 287 | 298 | YICENQDSISSK |
| 1467.8431 | 1467.8422 | −0.0009 | −1 | 361 | 372 | RHPDYSVVLLLR |
| 1511.8429 | 1511.8425 | −0.0004 | 0 | 439 | 452 | VPQVSTPTLVEV |
| | | | | | | SR |
| 1546.7968 | 1546.7894 | −0.0074 | −5 | 299 | 310 | LKECCEKPLLEK |
| 1552.5978 | 1552.5894 | −0.0084 | −5 | 384 | 396 | CCAAADPHECY |
| | | | | | | AK |
| 1623.7876 | 1623.7841 | −0.0035 | −2 | 348 | 360 | DVFLGMFLYEY |
| | | | | | | AR |
| 1627.6904 | 1627.7179 | 0.0275 | 17 | 585 | 598 | ADDKETCFAEE |
| | | | | | | GQK |
| 1639.9379 | 1639.906 | −0.0319 | −19 | 438 | 452 | KVPQVSTPTLVE |
| | | | | | | VSR |
| 1639.9379 | 1639.906 | −0.0319 | −19 | 438 | 452 | KVPQVSTPTLVE |
| | | | | | | VSR |
| 1657.7527 | 1657.7477 | −0.005 | −3 | 414 | 426 | QNCELFEQLGE |
| | | | | | | YK |
| 1662.7251 | 1662.7285 | 0.0034 | 2 | 185 | 198 | YKAAFTECCQA |
| | | | | | | ADK |
| 1714.7966 | 1714.7916 | −0.005 | −3 | 118 | 130 | QEPERNECFLQ |
| | | | | | | HK |
| 1910.9318 | 1910.9291 | −0.0027 | −1 | 509 | 524 | RPCFSALEVDE |
| | | | | | | TYVPK |
| 1910.9318 | 1910.9291 | −0.0027 | −1 | 509 | 524 | RPCFSALEVDE |
| | | | | | | TYVPK |
| 1932.0372 | 1932.0348 | −0.0024 | −1 | 89 | 105 | SLHTLFGDKLCT |
| | | | | | | VATLR |
| 1996.9294 | 1996.9313 | 0.0019 | 1 | 123 | 138 | NECFLQHKDDN |
| | | | | | | PNLPR |
| 2045.0955 | 2045.0941 | −0.0014 | −1 | 397 | 413 | VFDEFKPLVEEP |
| | | | | | | QNLIK |
| 2045.0955 | 2045.0941 | −0.0014 | −1 | 397 | 413 | VFDEFKPLVEEP |
| | | | | | | QNLIK |
| 2086.8376 | 2086.8457 | 0.0081 | 4 | 265 | 281 | VHTECCHGDLL |
| | | | | | | ECADDR |
| 2124.9875 | 2124.9778 | −0.0097 | −5 | 187 | 205 | AAFTECCQAAD |
| | | | | | | KAACLLPK |
| 2260.0227 | 2260.0229 | 0.0002 | 0 | 525 | 543 | EFNAETFTFHAD |
| | | | | | | ICTLSEK |
| 2545.1665 | 2545.2017 | 0.0352 | 14 | 525 | 545 | EFNAETFTFHAD |
| | | | | | | ICTLSEK |
| | | | | | | ER |
| 2545.1665 | 2545.2017 | 0.0352 | 14 | 525 | 545 | EFNAETFTFH |
| | | | | | | ADICTLSEK |
| | | | | | | ER |
| 2585.1177 | 2585.1587 | 0.041 | 16 | 265 | 286 | VHTECCHGDL |
| | | | | | | LECADDR |
| | 2585.1587 | | | | | ADLAK |
| 2585.1177 | 2585.1587 | 0.041 | 16 | 265 | 286 | VHTECCHGDL |
| | | | | | | LECADDR |
| | | | | | | ADLAK |
| 2599.2974 | 2599.2747 | −0.0227 | −9 | 414 | 434 | QNCELFEQLG |
| | | | | | | EYKFQNA |
| | | | | | | LLVR |
| 2650.2642 | 2650.2732 | 0.009 | 3 | 139 | 160 | LVRPEVDVMC |
| | | | | | | TAFHDNE |
| | | | | | | ETFLK |
| 2778.3589 | 2778.3901 | 0.0312 | 11 | 139 | 161 | LVRPEVDVMC |
| | | | | | | TAFHDNE |
| | | | | | | ETFLKK |
| 2778.3589 | 2778.3901 | 0.0312 | 11 | 139 | 161 | LVRPEVDVMC |
| | | | | | | TAFHDNE |
| | | | | | | ETFLKK |
| 2794.354 | 2794.3987 | 0.0447 | 16 | 139 | 161 | LVRPEVDVMC |
| | | | | | | TAFHDNE |
| | | | | | | ETFLKK |
| 2974.3445 | 2974.377 | 0.0325 | 11 | 311 | 337 | SHCIAEVEND |
| | | | | | | EMPADLPS |
| | | | | | | LAADFVESK |

[0744] 13—KH40 (SEQ ID NO. KH40)

| | |
|---|---|
| 285/L13 | Instr./Gel Origin |
| [1] Sample Project | |
| 20120229 | |
| | Instrument Sample |

| | | |
|---|---|---|
| Accession No. | Protein Name | Name |

| | |
|---|---|
| IPI00298497 | Tax_Id = 9606 Gene_Symbol = |
| | FGB Fibrinogen beta chain |

[0745] Peptide Information

| | Obsrv. | | | Start | End | |
|---|---|---|---|---|---|---|
| Calc. Mass | Mass | ±da | ±ppm | Seq. | Seq. | Sequence |
| 844.4886 | 844.4741 | −0.0145 | −17 | 200 | 206 | SILENLR |
| 886.3876 | 886.41 | 0.0224 | 25 | 472 | 478 | GSWYSMR |
| 980.4432 | 980.4583 | 0.0151 | 15 | 286 | 294 | QDGSVD |
| | | | | | | FGR |
| 1032.5626 | 1032.5824 | 0.0198 | 19 | 484 | 491 | IRPFFPQQ |
| 1032.5626 | 1032.5824 | 0.0198 | 19 | 484 | 491 | IRPFFPQQ |
| 1239.5178 | 1239.5336 | 0.0158 | 13 | 427 | 436 | EDGGGW |
| | | | | | | WYNR |
| 1239.5178 | 1239.5336 | 0.0158 | 13 | 427 | 436 | EDGGGW |
| | | | | | | WYNR |
| 1544.6952 | 1544.7151 | 0.0199 | 13 | 459 | 471 | HGTDDGVVW |
| | | | | | | MNWK |
| 1587.6777 | 1587.7048 | 0.0271 | 17 | 212 | 224 | LESDVSAQME |
| | | | | | | YCR |
| 1603.6727 | 1603.703 | 0.0303 | 19 | 212 | 224 | LESDVSAQME |
| | | | | | | YCR |
| 1684.7101 | 1684.7894 | 0.0793 | 47 | 446 | 458 | YYWGGQYTW |
| | | | | | | DMAK |
| 1742.734 | 1742.7664 | 0.0324 | 19 | 423 | 436 | QCSKEDGGG |
| | | | | | | WWYNR |
| 1951.0032 | 1951.0122 | 0.009 | 5 | 54 | 72 | EEAPSLRPAP |
| | | | | | | PPISGGGYR |
| 1951.0032 | 1951.0122 | 0.009 | 5 | 54 | 72 | EEAPSLRPAP |
| | | | | | | PPISGGGYR |
| 1956.9154 | 1956.9503 | 0.0349 | 18 | 209 | 224 | IQKLESDVSA |
| | | | | | | QMEYCR |
| 1972.9103 | 1972.9404 | 0.0301 | 15 | 209 | 224 | IQKLESDVSA |
| | | | | | | QMEYCR |
| 2107.1042 | 2107.1023 | −0.0019 | −1 | 53 | 72 | REEAPSLRPA |
| | | | | | | PPPISGGG |
| | | | | | | YR |
| 2127.083 | 2127.0779 | −0.0051 | −2 | 179 | 196 | HQLYIDETVNS |
| | | | | | | NIPTNLR |
| 2156.9487 | 2157.0083 | 0.0596 | 28 | 268 | 285 | VYCDMNTEN |
| | | | | | | GGWTVIQNR |
| 2156.9487 | 2157.0083 | 0.0596 | 28 | 268 | 285 | VYCDMNTEN |
| | | | | | | GGWTVIQNR |
| 2172.9438 | 2173.03 | 0.0862 | 40 | 268 | 285 | VYCDMNTEN |
| | | | | | | GGWTVIQNR |
| 2257.0806 | 2257.1052 | 0.0246 | 11 | 248 | 267 | GGETSEMYLI |
| | | | | | | QPDSSVKP |
| | | | | | | YR |
| 2273.0754 | 2273.0857 | 0.0103 | 5 | 248 | 267 | GGETSEMYLI |
| | | | | | | QPDSSVKP |
| | | | | | | YR |
| 2368.168 | 2368.1965 | 0.0285 | 12 | 354 | 374 | AHYGGFTVQN |
| | | | | | | EANKYQI |
| | | | | | | SVNK |
| 2385.1755 | 2385.1917 | 0.0162 | 7 | 247 | 267 | KGGETSEMYL |
| | | | | | | IQPDSSVK |
| | | | | | | PYR |
| 2401.1704 | 2401.1926 | 0.0222 | 9 | 247 | 267 | KGGETSEMYL |
| | | | | | | IQPDSSVK |
| | | | | | | PYR |
| 2548.2205 | 2548.196 | −0.0245 | −10 | 225 | 246 | TPCTVSCNIPV |
| | | | | | | VSGKECE |
| | | | | | | EIIR |

[0746] 14—KH41 (SEQ ID NO. KH41)

| | |
|---|---|
| 287/L15 | Instr./Gel Origin |
| [1] Sample Project | |
| 20120229 | |
| | Instrument Sample |

| | | |
|---|---|---|
| Accession No. | Protein Name | Name |

| | |
|---|---|
| IPI00645363 | Tax_Id = 9606 Gene_Symbol = |
| | IGHV4-31; IGHG1 Putative |
| | uncharacterized protein |
| | DKFZp686P15220 |

[0747] Peptide Information

| | | | | Start | End | |
|---|---|---|---|---|---|---|
| Calc. Mass | Obsrv. Mass | ±da | ±ppm | Seq. | Seq. | Sequence |
| 838.5032 | 838.5 | −0.0032 | −4 | 352 | 359 | ALPAPIEK |
| 1161.6296 | 1161.6312 | 0.0016 | 1 | 386 | 395 | NQVSLTCLVK |
| 1186.6467 | 1186.642 | −0.0047 | −4 | 147 | 158 | GPSVFPLAPSSK |
| 1286.674 | 1286.6803 | 0.0063 | 5 | 370 | 380 | EPQVYTLPPSR |
| 1304.5828 | 1304.6138 | 0.031 | 24 | 107 | 117 | AEDTALYYCAK |
| 1338.6835 | 1338.6791 | −0.0044 | −3 | 96 | 106 | NSLYLQMNSLR |
| 1677.802 | 1677.8113 | 0.0093 | 6 | 300 | 313 | FNWYVDGVEVH |
| | | | | | | NAK |
| 1677.802 | 1677.8113 | 0.0093 | 6 | 300 | 313 | FNWYVDGVEVH |
| | | | | | | NAK |
| 1724.9078 | 1724.9014 | −0.0064 | −4 | 366 | 380 | GQPREPQVYTL |
| | | | | | | PPSR |
| 1724.9078 | 1724.9014 | −0.0064 | −4 | 366 | 380 | GQPREPQVYTL |
| | | | | | | PPSR |
| 1747.9259 | 1747.865 | −0.0609 | −35 | 381 | 395 | DELTKNQVSLT |
| | | | | | | CLVK |
| 1872.9702 | 1872.9886 | 0.0184 | 10 | 370 | 385 | EPQVYTLPPSR |
| | | | | | | DELTK |
| 1872.9702 | 1872.9886 | 0.0184 | 10 | 370 | 385 | EPQVYTLPPSR |
| | | | | | | DELTK |
| 2139.0276 | 2139.0286 | 0.001 | 0 | 281 | 299 | TPEVTCVVVDV |
| | | | | | | SHEDPE |
| | | | | | | VK |
| 2139.0276 | 2139.0286 | 0.001 | 0 | 281 | 299 | TPEVTCVVVDV |
| | | | | | | SHEDPE |
| | | | | | | VK |
| 2544.1313 | 2544.175 | 0.0437 | 17 | 396 | 417 | GFYPSDIAVEW |
| | | | | | | ESNGQP |
| | | | | | | ENNYK |
| 2544.1313 | 2544.175 | 0.0437 | 17 | 396 | 417 | GFYPSDIAV |
| | | | | | | EWESNGQP |
| | | | | | | ENNYK |

[0748] 15—KH42 (SEQ ID NO. KH42)

| | |
|---|---|
| 288/L16 | Instr./Gel Origin |
| [1] Sample Project | |
| 20120229 | |
| | Instrument Sample |

| | | |
|---|---|---|
| Accession No. | Protein Name | Name |

| | |
|---|---|
| IPI00965713 | Tax_Id = 9606 Gene_Symbol = |
| | FGB fibrinogen beta chain |
| | isoform 2 preproprotein |

[0749] Peptide Information

| | Obsrv. | | | Start | End | |
|---|---|---|---|---|---|---|
| Calc. Mass | Mass | ±da | ±ppm | Seq. | Seq. | Sequence |
| 844.4886 | 844.4952 | 0.0066 | 8 | 141 | 147 | SILENLR |
| 886.3876 | 886.4086 | 0.021 | 24 | 413 | 419 | GSWYSMR |
| 980.4432 | 980.4391 | −0.0041 | −4 | 227 | 235 | QDGSVDFGR |
| 980.4432 | 980.4391 | −0.0041 | −4 | 227 | 235 | QDGSVDFGR |
| 1032.5626 | 1032.5549 | −0.0077 | −7 | 425 | 432 | IRPFFPQQ |
| 1032.5626 | 1032.5549 | −0.0077 | −7 | 425 | 432 | IRPFFPQQ |
| 1239.5178 | 1239.5162 | −0.0016 | −1 | 368 | 377 | EDGGGWWYNR |
| 1239.5178 | 1239.5162 | −0.0016 | −1 | 368 | 377 | EDGGGWWYNR |
| 1308.6179 | 1308.6721 | 0.0542 | 41 | 242 | 254 | QGFGNVATNT |
| | | | | | | DGK |
| 1535.7238 | 1535.7338 | 0.01 | 7 | 295 | 308 | AHYGGFTVQN |
| | | | | | | EANK |
| 1587.6777 | 1587.6759 | −0.0018 | −1 | 153 | 165 | LESDVSAQME |
| | | | | | | YCR |
| 1603.6727 | 1603.6925 | 0.0198 | 12 | 153 | 165 | LESDVSAQME |
| | | | | | | YCR |
| 1742.734 | 1742.7518 | 0.0178 | 10 | 364 | 377 | QCSKEDGGG |
| | | | | | | WWYNR |
| 1956.9154 | 1956.9871 | 0.0717 | 37 | 150 | 165 | IQKLESDVSA |
| | | | | | | QMEYCR |
| 2127.083 | 2127.0815 | −0.0015 | −1 | 120 | 137 | HQLYIDETVNS |
| | | | | | | NIPTNLR |
| 2156.9487 | 2156.9648 | 0.0161 | 7 | 209 | 226 | VYCDMNTEN |
| | | | | | | GGWTVIQNR |
| 2172.9438 | 2172.9812 | 0.0374 | 17 | 209 | 226 | VYCDMNTEN |
| | | | | | | GGWTVIQNR |
| 2257.0806 | 2257.0881 | 0.0075 | 3 | 189 | 208 | GGETSEMYLI |
| | | | | | | QPDSSVKP |
| | | | | | | YR |
| 2273.0754 | 2273.1035 | 0.0281 | 12 | 189 | 208 | GGETSEMYLI |
| | | | | | | QPDSSVKP |
| | | | | | | YR |
| 2401.1704 | 2401.1489 | −0.0215 | −9 | 188 | 208 | KGGETSEMYL |
| | | | | | | IQPDSSVK |
| | | | | | | PYR |

[0750] 16—KH43 (SEQ ID NO. KH43)

| | |
|---|---|
| 289/L17 | Instr./Gel Origin |
| [1] Sample Project | |
| 20120229 | |
| | Instrument Sample |

| | | |
|---|---|---|
| Accession No. | Protein Name | Name |

| | |
|---|---|
| IPI00219713 | Tax_Id = 9606 Gene_Symbol = |
| | FGG Isoform Gamma-A of |
| | Fibrinogen gamma chain |

[0751] Peptide Information

| | Obsrv. | | | Start | End | |
|---|---|---|---|---|---|---|
| Calc. Mass | Mass | ±da | ±ppm | Seq. | Seq. | Sequence |
| 1034.5266 | 1034.5413 | 0.0147 | 14 | 293 | 301 | VGPEADKYR |
| 1034.5266 | 1034.5413 | 0.0147 | 14 | 293 | 301 | VGPEADKYR |
| 1117.5273 | 1117.5367 | 0.0094 | 8 | 274 | 282 | VELEDWNGR |
| 1117.5273 | 1117.5367 | 0.0094 | 8 | 274 | 282 | VELEDWNGR |
| 1134.5137 | 1134.5328 | 0.0191 | 17 | 283 | 292 | TSTADYAMFK |
| 1150.5085 | 1150.5295 | 0.021 | 18 | 283 | 292 | TSTADYAMFK |
| 1194.4878 | 1194.507 | 0.0192 | 16 | 32 | 40 | DNCCILDER |
| 1194.4878 | 1194.507 | 0.0192 | 16 | 32 | 40 | DNCCILDER |
| 1293.7566 | 1293.766 | 0.0094 | 7 | 189 | 199 | QSGLYFIKPLK |
| 1491.7438 | 1491.7627 | 0.0189 | 13 | 122 | 134 | YEASILTHDSS |
| | | | | | | IR |
| 1491.7438 | 1491.7627 | 0.0189 | 13 | 122 | 134 | YEASILTHDSS |
| | | | | | | IR |
| 1513.7281 | 1513.7418 | 0.0137 | 9 | 135 | 146 | YLQEIYNSNN |
| | | | | | | QK |
| 1513.7281 | 1513.7418 | 0.0137 | 9 | 135 | 146 | YLQEIYNSNN |
| | | | | | | QK |
| 1545.8132 | 1545.8203 | 0.0071 | 5 | 418 | 432 | LTIGEGQQHH |
| | | | | | | LGGAK |
| 1682.9589 | 1682.9622 | 0.0033 | 2 | 259 | 273 | IHLISTQSAIPY |
| | | | | | | ALR |
| 1682.9589 | 1682.9622 | 0.0033 | 2 | 259 | 273 | IHLISTQSAIPY |
| | | | | | | ALR |
| 1893.9131 | 1893.9221 | 0.009 | 5 | 383 | 399 | ASTPNGYDNG |
| | | | | | | IIWATWK |
| 1893.9131 | 1893.9221 | 0.009 | 5 | 383 | 399 | ASTPNGYDNG |
| | | | | | | IIWATWK |
| 2011.908 | 2011.9553 | 0.0473 | 24 | 365 | 382 | CHAGHLNGVY |
| | | | | | | YQGGTYSK |
| 2207.0405 | 2207.0752 | 0.0347 | 16 | 239 | 258 | EGFGHLSPTG |
| | | | | | | TTEFWLG |
| | | | | | | NEK |
| 2207.0405 | 2207.0752 | 0.0347 | 16 | 239 | 258 | EGFGHLSPTG |
| | | | | | | TTEFWLG |
| | | | | | | NEK |
| 2233.0229 | 2233.1147 | 0.0918 | 41 | 274 | 292 | VELEDWNGRT |
| | | | | | | STADYAM |
| | | | | | | FK |
| 2286.2466 | 2286.167 | −0.0796 | −35 | 412 | 432 | IIPFNRLTIGEG |
| | | | | | | QQHHLG |
| | | | | | | GAK |
| 2520.2651 | 2520.2727 | 0.0076 | 3 | 89 | 111 | AIQLTYNPDES |
| | | | | | | SKPNMID |
| | | | | | | AATLK |
| 2520.2651 | 2520.2727 | 0.0076 | 3 | 89 | 111 | AIQLTYNPDES |
| | | | | | | SKPNMID |
| | | | | | | AATLK |
| 2536.26 | 2536.2661 | 0.0061 | 2 | 89 | 111 | AIQLTYNPDES |
| | | | | | | SKPNMID |
| | | | | | | AATLK |
| 2768.3342 | 2768.3794 | 0.0452 | 16 | 154 | 177 | VAQLEAQCQE |
| | | | | | | PCKDTVQ |
| | | | | | | IHDITGK |

[0752] 17—KH44 (SEQ ID NO. KH44)

| | |
|---|---|
| 290/L18 | Instr./Gel Origin |
| [1] Sample Project | |
| 20120229 | |
| | Instrument Sample |

| | | |
|---|---|---|
| Accession No. | Protein Name | Name |

| | |
|---|---|
| IPI00022463 | Tax_Id = 9606 Gene_Symbol = |
| | TF Serotransferrin |

[0753] Peptide Information

| | | | | Start | End | |
|---|---|---|---|---|---|---|
| Calc. Mass | Obsrv. Mass | ±da | ±ppm | Seq. | Seq. | Sequence |
| 887.4152 | 887.3967 | −0.0185 | −21 | 468 | 475 | SCHTAVGR |
| 997.4771 | 997.474 | −0.0031 | −3 | 62 | 69 | ASYLDCIR |
| 997.4771 | 997.474 | −0.0031 | −3 | 62 | 69 | ASYLDCIR |
| 1015.5101 | 1015.5061 | −0.004 | −4 | 467 | 475 | KSCHTAVGR |
| 1125.5721 | 1125.5708 | −0.0013 | −1 | 61 | 69 | KASYLDCIR |
| 1125.5721 | 1125.5708 | −0.0013 | −1 | 61 | 69 | KASYLDCIR |
| 1195.5525 | 1195.5483 | −0.0042 | −4 | 123 | 132 | DSGFQMNQLR |
| 1195.5525 | 1195.5483 | −0.0042 | −4 | 123 | 132 | DSGFQMNQLR |
| 1208.5299 | 1208.5386 | 0.0087 | 7 | 38 | 46 | CQSFRDHMK |
| 1211.5474 | 1211.5521 | 0.0047 | 4 | 123 | 132 | DSGFQMNQLR |
| 1211.5474 | 1211.5521 | 0.0047 | 4 | 123 | 132 | DSGFQMNQLR |
| 1224.5249 | 1224.5237 | −0.0012 | −1 | 38 | 46 | CQSFRDHMK |
| 1249.606 | 1249.6061 | 0.0001 | 0 | 454 | 464 | SASDLTWDN |
| | | | | | | LK |
| 1249.606 | 1249.6061 | 0.0001 | 0 | 454 | 464 | SASDLTWDN |
| | | | | | | LK |
| 1273.6536 | 1273.658 | 0.0044 | 3 | 226 | 236 | HSTIFENLANK |
| 1276.6321 | 1276.6476 | 0.0155 | 12 | 300 | 310 | EFQLFSSPH |
| | | | | | | GK |
| 1317.5892 | 1317.5781 | −0.0111 | −8 | 27 | 37 | WCAVSEHEA |
| | | | | | | TK |
| 1323.6475 | 1323.6814 | 0.0339 | 26 | 122 | 132 | KDSGFQMN |
| | | | | | | QLR |
| 1323.7168 | 1323.6814 | −0.0354 | −27 | 316 | 327 | DSAHGFLKV |
| | | | | | | PPR |
| 1339.6423 | 1339.6335 | −0.0088 | −7 | 122 | 132 | KDSGFQMN |
| | | | | | | QLR |
| 1377.7009 | 1377.7019 | 0.001 | 1 | 453 | 464 | KSASDLTWD |
| | | | | | | NLK |
| 1379.6989 | 1379.7036 | 0.0047 | 3 | 213 | 225 | CLKDGAGDV |
| | | | | | | AFVK |
| 1415.72 | 1415.7271 | 0.0071 | 5 | 47 | 60 | SVIPSDGPSV |
| | | | | | | ACVK |
| 1478.7349 | 1478.7434 | 0.0085 | 6 | 332 | 343 | MYLGYEYVT |
| | | | | | | AIR |
| 1491.759 | 1491.7697 | 0.0107 | 7 | 298 | 310 | SKEFQLFSS |
| | | | | | | PHGK |
| 1494.7297 | 1494.7303 | 0.0006 | 0 | 332 | 343 | MYLGYEYVT |
| | | | | | | AIR |
| 1494.7297 | 1494.7303 | 0.0006 | 0 | 332 | 343 | MYLGYEYVT |
| | | | | | | AIR |
| 1521.7367 | 1521.7426 | 0.0059 | 4 | 372 | 384 | LKCDEWSVN |
| | | | | | | SVGK |
| 1539.7108 | 1539.7416 | 0.0308 | 20 | 240 | 251 | DQYELLCLD |
| | | | | | | NTR |
| 1543.8149 | 1543.7887 | −0.0262 | −17 | 47 | 61 | SVIPSDGPSV |
| | | | | | | ACVKK |
| 1629.8159 | 1629.8063 | −0.0096 | −6 | 108 | 121 | EDPQTFYYA |
| | | | | | | VAVVK |
| 1689.849 | 1689.858 | 0.009 | 5 | 259 | 273 | DCHLAQVPS |
| | | | | | | HTVVAR |
| 1725.767 | 1725.7739 | 0.0069 | 4 | 385 | 399 | IECVSAETTE |
| | | | | | | DCIAK |
| 1757.9109 | 1757.8904 | −0.0205 | −12 | 108 | 122 | EDPQTFYYA |
| | | | | | | VAVVKK |
| 1817.8044 | 1817.8302 | 0.0258 | 14 | 347 | 362 | EGTCPEAPT |
| | | | | | | DECKPVK |
| 1881.876 | 1881.8823 | 0.0063 | 3 | 237 | 251 | ADRDQYELL |
| | | | | | | CLDNTR |
| 1881.876 | 1881.8823 | 0.0063 | 3 | 237 | 251 | ADRDQYELL |
| | | | | | | CLDNTR |
| 1939.9292 | 1940.0519 | 0.1227 | 63 | 328 | 343 | MDAKMYLGY |
| | | | | | | EYVTAIR |
| 2171.0955 | 2171.116 | 0.0205 | 9 | 144 | 162 | SAGWNIPIGLL |
| | | | | | | YCDLPEPR |
| 2175.0098 | 2175.0344 | 0.0246 | 11 | 400 | 420 | IMNGEADAMS |
| | | | | | | LDGGFVYI |
| | | | | | | AGK |
| 2191.0046 | 2191.0286 | 0.024 | 11 | 400 | 420 | IMNGEADAMS |
| | | | | | | LDGGFVYI |
| | | | | | | AGK |
| 2201.0325 | 2201.03 | −0.0025 | −1 | 344 | 362 | NLREGTCPEA |
| | | | | | | PTDECKP |
| | | | | | | VK |
| 2233.1248 | 2233.1216 | −0.0032 | −1 | 216 | 236 | DGAGDVAFVK |
| | | | | | | HSTIFENL |
| | | | | | | ANK |
| 2549.293 | 2549.3047 | 0.0117 | 5 | 252 | 273 | KPVDEYKDCH |
| | | | | | | LAQVPSH |
| | | | | | | TVVAR |
| 2549.293 | 2549.3047 | 0.0117 | 5 | 252 | 273 | KPVDEYKDCH |
| | | | | | | LAQVPSH |
| | | | | | | TVVAR |

[0754] 18—KH45 (SEQ ID NO. KH45)

| | |
|---|---|
| 291/L19 | Instr./Gel Origin |
| [1] Sample Project | |
| 20120229 | |
| | Instrument Sample |

| | | |
|---|---|---|
| Accession No. | Protein Name | Name |

| | |
|---|---|
| IPI00023006 | Tax_Id = 9606 Gene_Symbol = |
| | ACTC1 Actin, alpha cardiac |
| | muscle 1 |

[0755] Peptide Information

| | |
|---|---|
| IPI00008603 | Tax_Id = 9606 |
| | Gene_Symbol = ACTA2 Actin, |
| | aortic smooth muscle |

[0756] Peptide Information

| | | | | Start | End | |
|---|---|---|---|---|---|---|
| Calc. Mass | Obsrv. Mass | ±da | ±ppm | Seq. | Seq. | Sequence |
| 923.5672 | 923.5524 | −0.0148 | −16 | 331 | 338 | IIAPPERK |
| 976.4483 | 976.4329 | −0.0154 | −16 | 21 | 30 | AGFAGDDAPR |
| 1036.6514 | 1036.6401 | −0.0113 | −11 | 329 | 337 | IKIIAPPER |
| 1130.5477 | 1130.532 | −0.0157 | −14 | 199 | 208 | GYSFVTTAER |
| 1130.5477 | 1130.532 | −0.0157 | −14 | 199 | 208 | GYSFVTTAER |
| 1171.5712 | 1171.5664 | −0.0048 | −4 | 42 | 52 | HQGVMVGMGQK |
| 1187.566 | 1187.5728 | 0.0068 | 6 | 42 | 52 | HQGVMVGMGQK |
| 1198.7056 | 1198.6915 | −0.0141 | −12 | 31 | 41 | AVFPSIVGRPR |
| 1198.7056 | 1198.6915 | −0.0141 | −12 | 31 | 41 | AVFPSIVGRPR |
| 1203.5609 | 1203.5902 | 0.0293 | 24 | 42 | 52 | HQGVMVGMGQK |
| 1354.6234 | 1354.6309 | 0.0075 | 6 | 53 | 64 | DSYVGDEAQSKR |
| 1500.7078 | 1500.7155 | 0.0077 | 5 | 362 | 374 | QEYDEAGPSI |
| | | | | | | VHR |
| 1500.7078 | 1500.7155 | 0.0077 | 5 | 362 | 374 | QEYDEAGPSI |
| | | | | | | VHR |
| 1623.8411 | 1623.8591 | 0.018 | 11 | 180 | 193 | LDLAGRDLTD |
| | | | | | | YLMK |
| 1627.8439 | 1627.8619 | 0.018 | 11 | 199 | 212 | GYSFVTTAER |
| | | | | | | EIVR |
| 1639.8361 | 1639.8571 | 0.021 | 13 | 180 | 193 | LDLAGRDLTD |
| | | | | | | YLMK |
| 1790.892 | 1790.9082 | 0.0162 | 9 | 241 | 256 | SYELPDGQVIT |
| | | | | | | IGNER |
| 1790.892 | 1790.9082 | 0.0162 | 9 | 241 | 256 | SYELPDGQVIT |
| | | | | | | IGNER |
| 1956.0437 | 1956.0748 | 0.0311 | 16 | 98 | 115 | VAPEEHPTLLT |
| | | | | | | EAPLNPK |
| 1956.0437 | 1956.0748 | 0.0311 | 16 | 98 | 115 | VAPEEHPTLLT |
| | | | | | | EAPLNPK |
| 2228.0652 | 2228.1257 | 0.0605 | 27 | 294 | 314 | DLYANNVLSG |
| | | | | | | GTTMYPGI |
| | | | | | | ADR |

[0757] 19—KH46 (SEQ ID NO. KH46)

| | |
|---|---|
| 292/L20 | Instr./Gel Origin |
| [1] Sample Project | |
| 20120229 | |
| | Instrument Sample |

| | | |
|---|---|---|
| Accession No. | Protein Name | Name |

| | |
|---|---|
| IPI00021841 | Tax_Id = 9606 Gene_Symbol = |
| | APOA1 Apolipoprotein A-I |
| | Peptide Information |

| | | | | Start | End | |
|---|---|---|---|---|---|---|
| Calc. Mass | Obsrv. Mass | ±da | ±ppm | Seq. | Seq. | Sequence |
| 869.5203 | 869.5239 | 0.0036 | 4 | 141 | 147 | QKVEPLR |
| 873.4424 | 873.4615 | 0.0191 | 22 | 148 | 155 | AELQEGAR |
| 1012.5786 | 1012.5906 | 0.012 | 12 | 231 | 239 | AKPALEDLR |
| 1012.5786 | 1012.5906 | 0.012 | 12 | 231 | 239 | AKPALEDLR |
| 1047.5139 | 1047.5322 | 0.0183 | 17 | 165 | 173 | LSPLGEEMR |
| 1152.6372 | 1152.6506 | 0.0134 | 12 | 156 | 164 | QKLHELQEK |
| 1215.6216 | 1215.6224 | 0.0008 | 1 | 220 | 230 | ATEHLSTLSEK |
| 1252.6208 | 1252.6204 | −0.0004 | 0 | 121 | 130 | VQPYLDDFQK |
| 1283.5725 | 1283.5679 | −0.0046 | −4 | 132 | 140 | WQEEMELYR |
| 1299.5674 | 1299.5654 | −0.002 | −2 | 132 | 140 | WQEEMELYR |
| 1301.6484 | 1301.6364 | −0.012 | −9 | 185 | 195 | THLAPYSDELR |
| 1301.6484 | 1301.6364 | −0.012 | −9 | 185 | 195 | THLAPYSDELR |
| 1307.626 | 1307.5776 | −0.0484 | −37 | 102 | 112 | ETEGLRQEMSK |
| 1318.642 | 1318.6289 | −0.0131 | −10 | 165 | 175 | LSPLGEEMRDR |
| 1318.642 | 1318.6289 | −0.0131 | −10 | 165 | 175 | LSPLGEEMRDR |
| 1323.621 | 1323.6036 | −0.0174 | −13 | 102 | 112 | ETEGLRQEMSK |
| 1380.7158 | 1380.6981 | −0.0177 | −13 | 121 | 131 | VQPYLDDFQKK |
| 1380.7158 | 1380.6981 | −0.0177 | −13 | 121 | 131 | VQPYLDDFQKK |
| 1400.6693 | 1400.6514 | −0.0179 | −13 | 52 | 64 | DYVSQFEGSA |
| | | | | | | LGK |
| 1427.6624 | 1427.649 | −0.0134 | −9 | 131 | 140 | KWQEEMELYR |
| 1462.8516 | 1462.7736 | −0.078 | −53 | 35 | 47 | VKDLATVYVD |
| | | | | | | VLK |
| 1467.7914 | 1467.7683 | −0.0231 | −16 | 143 | 155 | VEPLRAELQE |
| | | | | | | GAR |
| 1467.7914 | 1467.7683 | −0.0231 | −16 | 143 | 155 | VEPLRAELQE |
| | | | | | | GAR |
| 1585.8081 | 1585.7871 | −0.021 | −13 | 185 | 197 | THLAPYSDEL |
| | | | | | | RQR |
| 1612.7854 | 1612.7574 | −0.028 | −17 | 70 | 83 | LLDNWDSVTS |
| | | | | | | TFSK |
| 1650.8698 | 1650.8358 | −0.034 | −21 | 37 | 51 | DLATVYVDVL |
| | | | | | | KDSGR |
| 1815.8508 | 1815.8008 | −0.05 | −28 | 48 | 64 | DSGRDYVSQ |
| | | | | | | FEGSALGK |
| 1815.8508 | 1815.8008 | −0.05 | −28 | 48 | 64 | DSGRDYVSQ |
| | | | | | | FEGSALGK |
| 2202.1189 | 2202.0535 | −0.0654 | −30 | 84 | 101 | LREQLGPVTQ |
| | | | | | | EFWDNLE |

[0758] 20—KH47 (SEQ ID NO. KH47)

| | |
|---|---|
| 293/L21 | Instr./Gel Origin |
| [1] Sample Project | |
| 20120229 | |
| | Instrument Sample |

| | | |
|---|---|---|
| Accession No. | Protein Name | Name |

| | |
|---|---|
| IPI00023006 | Tax_Id = 9606 Gene_Symbol = |
| | ACTC1 Actin, alpha cardiac |
| | muscle 1 |

[0759] Protein Group

| | |
|---|---|
| IPI00008603 | Tax_Id = 9606 |
| | Gene_Symbol = ACTA2 Actin, |
| | aortic smooth muscle |

[0760] Peptide Information

| | | | | Start | End | |
|---|---|---|---|---|---|---|
| Calc. Mass | Obsrv. Mass | ±da | ±ppm | Seq. | Seq. | Sequence |
| 923.5672 | 923.5429 | −0.0243 | −26 | 331 | 338 | IIAPPERK |
| 976.4483 | 976.4276 | −0.0207 | −21 | 21 | 30 | AGFAGDDAPR |
| 1036.6514 | 1036.6403 | −0.0111 | −11 | 329 | 337 | IKIIAPPER |
| 1130.5477 | 1130.5374 | −0.0103 | −9 | 199 | 208 | GYSFVTTAER |
| 1130.5477 | 1130.5374 | −0.0103 | −9 | 199 | 208 | GYSFVTTAER |
| 1198.7056 | 1198.7004 | −0.0052 | −4 | 31 | 41 | AVFPSIVGRPR |
| 1198.7056 | 1198.7004 | −0.0052 | −4 | 31 | 41 | AVFPSIVGRPR |
| 1203.5609 | 1203.5531 | −0.0078 | −6 | 42 | 52 | HQGVMVGMGQK |
| 1354.6234 | 1354.6332 | 0.0098 | 7 | 53 | 64 | DSYVGDEAQSKR |
| 1500.7078 | 1500.7264 | 0.0186 | 12 | 362 | 374 | QEYDEAGPSIV |
| | | | | | | HR |

[0761] 21—KH48 (SEQ ID NO. KH48)

| | |
|---|---|
| 294/L22 | Instr./Gel Origin |
| [1] Sample Project | |
| 20120229 | |
| | Instrument Sample |

| Accession No. | Protein Name | Name |
|---|---|---|
| IPI00784842 | Tax_Id = 9606 Gene_Symbol = | |
| | IGHV4-31; IGHG1 Putative | |
| | uncharacterized protein | |
| | DKFZp686G11190 | |

[0762] Peptide Information

| | | | | Start | End | |
|---|---|---|---|---|---|---|
| Calc. Mass | Obsrv. Mass | ±da | ±ppm | Seq. | Seq. | Sequence |
| 838.5032 | 838.4819 | −0.0213 | −25 | 355 | 362 | ALPAPIEK |
| 1161.6296 | 1161.6184 | −0.0112 | −10 | 389 | 398 | NQVSLTCLVK |
| 1286.674 | 1286.6669 | −0.0071 | −6 | 373 | 383 | EPQVYTLPPSR |
| 1286.674 | 1286.6669 | −0.0071 | −6 | 373 | 383 | EPQVYTLPPSR |
| 1677.802 | 1677.7974 | −0.0046 | −3 | 303 | 316 | FNWYVDGVEVH |
| | | | | | | NAK |
| 1677.802 | 1677.7974 | −0.0046 | −3 | 303 | 316 | FNWYVDGVE |
| | | | | | | VHNAK |
| 1724.9078 | 1724.8474 | −0.0604 | −35 | 369 | 383 | GQPREPQVY |
| | | | | | | TLPPSR |
| 1872.9702 | 1872.979 | 0.0088 | 5 | 373 | 388 | EPQVYTLPPS |
| | | | | | | RDELTK |
| 1872.9702 | 1872.979 | 0.0088 | 5 | 373 | 388 | EPQVYTLPPS |
| | | | | | | RDELTK |
| 2139.0276 | 2139.0415 | 0.0139 | 6 | 284 | 302 | TPEVTCVVVD |
| | | | | | | VSHEDPE |
| | | | | | | VK |
| 2139.0276 | 2139.0415 | 0.0139 | 6 | 284 | 302 | TPEVTCVVVD |
| | | | | | | VSHEDPE |
| | | | | | | VK |
| 2510.282 | 2510.2266 | −0.0554 | −22 | 85 | 106 | GRFTISGDIST |
| | | | | | | NTLYLQM |
| | | | | | | HSLR |
| 2544.1313 | 2544.2078 | 0.0765 | 30 | 399 | 420 | GFYPSDIAVE |
| | | | | | | WESNGQP |
| | | | | | | ENNYK |
| 2544.1313 | 2544.2078 | 0.0765 | 30 | 399 | 420 | GFYPSDIAVE |
| | | | | | | WESNGQP |
| | | | | | | ENNYK |

[0763] 22—KH49 (SEQ ID NO. KH49)

| | |
|---|---|
| 295/L23 | Instr./Gel Origin |
| [1] Sample Project | |
| 20120229 | |
| | Instrument Sample |

| | | |
|---|---|---|
| Accession No. | Protein Name | Name |

| | |
|---|---|
| IPI00930226 | Tax_Id = 9606 Gene_Symbol = |
| | ACTG1 cDNA FLJ57283, highly |
| | similar to Actin, cytoplasmic 2 |

[0764] Peptide Information

| | | | | Start | End | |
|---|---|---|---|---|---|---|
| Calc. Mass | Obsrv. Mass | ±da | ±ppm | Seq. | Seq. | Sequence |
| 923.5672 | 923.568 | 0.0008 | 1 | 310 | 317 | IIAPPERK |
| 976.4483 | 976.4448 | −0.0035 | −4 | 19 | 28 | AGFAGDDAPR |
| 976.4483 | 976.4448 | −0.0035 | −4 | 19 | 28 | AGFAGDDAPR |
| 998.4863 | 998.47 | −0.0163 | −16 | 165 | 172 | DLTDYLMK |
| 1036.6514 | 1036.6456 | −0.0058 | −6 | 308 | 316 | IKIIAPPER |
| 1132.527 | 1132.5206 | −0.0064 | −6 | 178 | 187 | GYSFTTTAER |
| 1132.527 | 1132.5206 | −0.0064 | −6 | 178 | 187 | GYSFTTTAER |
| 1171.5712 | 1171.5726 | 0.0014 | 1 | 40 | 50 | HQGVMVGMGQK |
| 1187.566 | 1187.5695 | 0.0035 | 3 | 40 | 50 | HQGVMVGMGQK |
| 1198.7056 | 1198.6975 | −0.0081 | −7 | 29 | 39 | AVFPSIVGRPR |
| 1198.7056 | 1198.6975 | −0.0081 | −7 | 29 | 39 | AVFPSIVGRPR |
| 1203.5609 | 1203.5579 | −0.003 | −2 | 40 | 50 | HQGVMVGMGQK |
| 1354.6234 | 1354.6196 | −0.0038 | −3 | 51 | 62 | DSYVGDEAQSKR |
| 1515.7491 | 1515.7416 | −0.0075 | −5 | 85 | 95 | IWHHTFYNELR |
| 1516.7028 | 1516.6996 | −0.0032 | −2 | 341 | 353 | QEYDESGPSI |
| | | | | | | VHR |
| 1516.7028 | 1516.6996 | −0.0032 | −2 | 341 | 353 | QEYDESGPSI |
| | | | | | | VHR |
| 1623.8411 | 1623.8331 | −0.008 | −5 | 159 | 172 | LDLAGRDLTD |
| | | | | | | YLMK |
| 1629.8231 | 1629.8138 | −0.0093 | −6 | 178 | 191 | GYSFTTTAER |
| | | | | | | EIVR |
| 1639.8361 | 1639.8345 | −0.0016 | −1 | 159 | 172 | LDLAGRDLTD |
| | | | | | | YLMK |
| 1644.7976 | 1644.7946 | −0.003 | −2 | 341 | 354 | QEYDESGPSI |
| | | | | | | VHRK |
| 1790.892 | 1790.885 | −0.007 | −4 | 220 | 235 | SYELPDGQVI |
| | | | | | | TIGNER |
| 1790.892 | 1790.885 | −0.007 | −4 | 220 | 235 | SYELPDGQVI |
| | | | | | | TIGNER |
| 1954.0645 | 1954.0524 | −0.0121 | −6 | 96 | 113 | VAPEEHPVLL |
| | | | | | | TEAPLNPK |
| 1954.0645 | 1954.0524 | −0.0121 | −6 | 96 | 113 | VAPEEHPVLL |
| | | | | | | TEAPLNPK |
| 2215.0701 | 2215.0815 | 0.0114 | 5 | 273 | 293 | DLYANTVLSG |
| | | | | | | GTTMYPGI |
| | | | | | | ADR |
| 2215.0701 | 2215.0815 | 0.0114 | 5 | 273 | 293 | DLYANTVLSG |
| | | | | | | GTTMYPGI |
| | | | | | | ADR |
| 2231.0649 | 2231.0654 | 0.0005 | 0 | 273 | 293 | DLYANTVLSG |
| | | | | | | GTTMYPGI |
| | | | | | | ADR |
| 2343.165 | 2343.1611 | −0.0039 | −2 | 272 | 293 | KDLYANTVLS |
| | | | | | | GGTTMYP |
| | | | | | | GIADR |

[0765] 23—KH50 (SEQ ID NO. KH50)

| | |
|---|---|
| 296/L24 | Instr./Gel Origin |
| [1] Sample Project | |
| 20120229 | |
| | Instrument Sample |

| Accession No. | Protein Name | Name |
|---|---|---|
| IPI00022371 | Tax_Id = 9606 | |
| | Gene_Symbol = HRG Histidine- | |
| | rich glycoprotein | |

[0766] Peptide Information

| | Obsrv. | | | Start | End | |
|---|---|---|---|---|---|---|
| Calc. Mass | Mass | ±da | ±ppm | Seq. | Seq. | Sequence |
| 942.5731 | 942.5751 | 0.002 | 2 | 34 | 41 | ALDLINKR |
| 1108.5131 | 1108.5219 | 0.0088 | 8 | 112 | 120 | HSHESQDLR |
| 1124.6099 | 1124.6121 | 0.0022 | 2 | 44 | 52 | DGYLFQLLR |
| 1124.6099 | 1124.6121 | 0.0022 | 2 | 44 | 52 | DGYLFQLLR |
| 1133.531 | 1133.53 | −0.001 | −1 | 211 | 219 | HPNVFGFCR |
| 1133.531 | 1133.53 | −0.001 | −1 | 211 | 219 | HPNVFGFCR |
| 1280.7111 | 1280.7106 | −0.0005 | 0 | 43 | 52 | RDGYLFQLLR |
| 1286.6886 | 1286.6846 | −0.004 | −3 | 96 | 106 | RPSEIVIGQCK |
| 1286.6886 | 1286.6846 | −0.004 | −3 | 96 | 106 | RPSEIVIGQCK |
| | 1286.6846 | | | | | |
| 1438.5692 | 1438.5994 | 0.0302 | 21 | 85 | 95 | YWNDCEPPDSR |
| 1490.6912 | 1490.6945 | 0.0033 | 2 | 188 | 201 | GGEGTGYFVDFSVR |
| 1490.6912 | 1490.6945 | 0.0033 | 2 | 188 | 201 | GGEGTGYFVDFSVR |
| 1520.6653 | 1520.6693 | 0.004 | 3 | 165 | 176 | YKEENDDFASFR |
| 1520.6653 | 1520.6693 | 0.004 | 3 | 165 | 176 | YKEENDDFASFR |
| 1566.6642 | 1566.6665 | 0.0023 | 1 | 84 | 95 | KYWNDCEPPDSR |
| 1566.6642 | 1566.6665 | 0.0023 | 1 | 84 | 95 | KYWNDCEPPDSR |
| 1682.7909 | 1682.7927 | 0.0018 | 1 | 140 | 153 | DSPVLIDFFEDTER |
| 1682.7909 | 1682.7927 | 0.0018 | 1 | 140 | 153 | DSPVLIDFFEDTER |
| 1745.8606 | 1745.8588 | −0.0018 | −1 | 186 | 201 | VRGGEGTGYFVDFSVR |
| 1745.8606 | 1745.8588 | −0.0018 | −1 | 186 | 201 | VRGGEGTGYFVDFSVR |
| 1824.8903 | 1824.8805 | −0.0098 | −5 | 220 | 235 | ADLFYDVEALDLESPK |
| 2001.9553 | 2001.9672 | 0.0119 | 6 | 140 | 155 | DSPVLIDFFEDTERYR |

[0767] 24—KH51 (SEQ ID NO. KH51)

| | |
|---|---|
| 299/M1 | Instr./Gel Origin |
| [1] Sample Project | |
| 20120229 | |
| | Instrument Sample |

| Accession No. | Protein Name | Name |
|---|---|---|
| IPI00022371 | Tax_Id = 9606 Gene_Symbol = | |
| | HRG Histidine-rich glycoprotein | |

[0768] Peptide Information

| | | | | Start | End | |
|---|---|---|---|---|---|---|
| Calc. Mass | Obsrv. Mass | ±da | ±ppm | Seq. | Seq. | Sequence |
| 942.5731 | 942.5731 | 0 | 0 | 34 | 41 | ALDLINKR |
| 1108.5131 | 1108.5183 | 0.0052 | 5 | 112 | 120 | HSHESQDLR |
| 1124.6099 | 1124.6101 | 0.0002 | 0 | 44 | 52 | DGYLFQLLR |
| 1124.6099 | 1124.6101 | 0.0002 | 0 | 44 | 52 | DGYLFQLLR |
| 1133.531 | 1133.5333 | 0.0023 | 2 | 211 | 219 | HPNVFGFCR |
| 1133.531 | 1133.5333 | 0.0023 | 2 | 211 | 219 | HPNVFGFCR |
| 1280.7111 | 1280.7091 | −0.002 | −2 | 43 | 52 | RDGYLFQLLR |
| 1286.6886 | 1286.6833 | −0.0053 | −4 | 96 | 106 | RPSEIVIGQCK |
| 1286.6886 | 1286.6833 | −0.0053 | −4 | 96 | 106 | RPSEIVIGQCK |
| 1438.5692 | 1438.5841 | 0.0149 | 10 | 85 | 95 | YWNDCEPPDSR |
| 1490.6912 | 1490.6917 | 0.0005 | 0 | 188 | 201 | GGEGTGYFVDF |
| | | | | | | SVR |
| 1490.6912 | 1490.6917 | 0.0005 | 0 | 188 | 201 | GGEGTGYFVDF |
| | | | | | | SVR |
| 1520.6653 | 1520.6692 | 0.0039 | 3 | 165 | 176 | YKEENDDFASFR |
| 1520.6653 | 1520.6692 | 0.0039 | 3 | 165 | 176 | YKEENDDFASFR |
| 1566.6642 | 1566.6675 | 0.0033 | 2 | 84 | 95 | KYWNDCEPPDSR |
| 1566.6642 | 1566.6675 | 0.0033 | 2 | 84 | 95 | KYWNDCEPPDSR |
| 1682.7909 | 1682.7971 | 0.0062 | 4 | 140 | 153 | DSPVLIDFFEDT |
| | | | | | | ER |
| 1682.7909 | 1682.7971 | 0.0062 | 4 | 140 | 153 | DSPVLIDFFEDT |
| | | | | | | ER |
| 1745.8606 | 1745.8633 | 0.0027 | 2 | 186 | 201 | VRGGEGTGYFV |
| | | | | | | DFSVR |
| 1745.8606 | 1745.8633 | 0.0027 | 2 | 186 | 201 | VRGGEGTGYFV |
| | | | | | | DFSVR |
| 1824.8903 | 1824.8855 | −0.0048 | −3 | 220 | 235 | ADLFYDVEALDL |
| | | | | | | ESPK |
| 1824.8903 | 1824.8855 | −0.0048 | −3 | 220 | 235 | ADLFYDVEALDL |
| | | | | | | ESPK |
| 2001.9553 | 2001.99 | 0.0347 | 17 | 140 | 155 | DSPVLIDFFEDT |
| | | | | | | ERYR |

[0769] 25—KH52 (SEQ ID NO. KH52)

| | |
|---|---|
| 300/M2 | Instr./Gel Origin |
| [1] Sample Project | |
| 20120229 | |
| | Instrument Sample |

| Accession No. | Protein Name | Name |
|---|---|---|
| IPI00878282 | Tax_Id = 9606 Gene_Symbol = | |
| | ALB 23 kDa protein | |

[0770] Peptide Information

| | | | | Start | End | |
|---|---|---|---|---|---|---|
| Calc. Mass | Obsrv. Mass | ±da | ±ppm | Seq. | Seq. | Sequence |
| 927.4934 | 927.4923 | −0.0011 | −1 | 164 | 170 | YLYEIAR |
| 927.4934 | 927.4923 | −0.0011 | −1 | 164 | 170 | YLYEIAR |
| 933.5186 | 933.5193 | 0.0007 | 1 | 100 | 107 | LCTVATLR |
| 940.4482 | 940.4518 | 0.0036 | 4 | 133 | 140 | DDNPNLPR |
| | 940.4518 | | | | | |
| 1055.5884 | 1055.5844 | −0.004 | −4 | 163 | 170 | KYLYEIAR |
| 1083.5946 | 1083.5922 | −0.0024 | −2 | 164 | 171 | YLYEIARR |
| 1149.615 | 1149.5994 | −0.0156 | −14 | 68 | 77 | LVNEVTEFAK |
| 1149.615 | 1149.5994 | −0.0156 | −14 | 68 | 77 | LVNEVTEFAK |
| 1226.6052 | 1226.5889 | −0.0163 | −13 | 37 | 46 | FKDLGEENFK |
| 1226.6052 | 1226.5889 | −0.0163 | −13 | 37 | 46 | FKDLGEENFK |
| 1434.5334 | 1434.5005 | −0.0329 | −23 | 108 | 119 | ETYGEMADCC |
| | | | | | | AK |
| 1434.5334 | 1434.5005 | −0.0329 | −23 | 108 | 119 | ETYGEMADCC |
| | | | | | | AK |
| 1450.5283 | 1450.5132 | −0.0151 | −10 | 108 | 119 | ETYGEMADCC |
| | | | | | | AK |
| 1498.5785 | 1498.5447 | −0.0338 | −23 | 78 | 90 | TCVADESAEN |
| | | | | | | CDK |
| 1714.7966 | 1714.7405 | −0.0561 | −33 | 120 | 132 | QEPERNECFL |
| | | | | | | QHK |
| 1714.7966 | 1714.7405 | −0.0561 | −33 | 120 | 132 | QEPERNECFL |
| | | | | | | QHK |
| 1932.0372 | 1931.9761 | −0.0611 | −32 | 91 | 107 | SLHTLFGDKL |
| | | | | | | CTVATLR |
| 1996.9294 | 1996.8643 | −0.0651 | −33 | 125 | 140 | NECFLQHKDD |
| | | | | | | NPNLPR |
| 1996.9294 | 1996.8643 | −0.0651 | −33 | 125 | 140 | NECFLQHKDD |
| | | | | | | NPNLPR |
| 2497.0969 | 2497.0144 | −0.0825 | −33 | 78 | 99 | TCVADESAEN |
| | | | | | | CDKSLHTL |
| 2650.2642 | 2650.1545 | −0.1097 | −41 | 141 | 162 | FGDK |
| | | | | | | LVRPEVDVMC |
| | | | | | | TAFHDNE |
| | | | | | | ETFLK |
| 2778.3589 | 2778.2568 | −0.1021 | −37 | 141 | 163 | LVRPEVDVMC |
| | | | | | | TAFHDNE |
| | | | | | | ETFLKK |
| 2778.3589 | 2778.2568 | −0.1021 | −37 | 141 | 163 | LVRPEVDVMC |
| | | | | | | TAFHDNE |
| | | | | | | ETFLKK |
| 2794.354 | 2794.2327 | −0.1213 | −43 | 141 | 163 | LVRPEVDVMC |
| | | | | | | TAFHDNE |
| | | | | | | ETFLKK |

[0771] In addition to the 52 KH discovered proteins, the inventor has found 3 more new found proteins. 1 in AFCC® (From fraction IV) and 2 in Transferrin with their sequence as follows:

| | | | |
|---|---|---|---|
| Gel Idx/Pos | | 102/E1 | Instr./Gel Origin |
| Plate [#] Name | | [1] Sample Project | Instrument Sample |
| | | 20120802 | Name |
| Rank | Accession No. | Protein Name | |

| | |
|---|---|
| gi\|194380034 | unnamed protein product [Homo sapiens] |
| Protein Group | |
| gi\|6650772 | PRO1400 [Homo sapiens] |
| | Project\Project sample_20120802\ |
| | P12139-2fncbi |

[0772] Peptide Information

| | | | | Start | End | |
|---|---|---|---|---|---|---|
| Calc. Mass | Obsrv. Mass | ±da | ±ppm | Seq. | Seq. | Sequence |
| 964.5323 | 964.5747 | 0.0424 | 44 | 474 | 482 | APNHAVVTR |
| 1000.4985 | 1000.5438 | 0.0453 | 45 | 542 | 549 | YLGEEYVK |
| 1195.5426 | 1195.6343 | 0.0917 | 77 | 236 | 244 | WCALSHHER |
| 1249.606 | 1249.7004 | 0.0944 | 76 | 327 | 337 | SASDLTWDNLK |
| 1283.5692 | 1283.6665 | 0.0973 | 76 | 404 | 414 | EGYYGYTGAFR |
| 1283.5692 | 1283.6665 | 0.0973 | 76 | 404 | 414 | EGYYGYTGAFR |
| 1323.7168 | 1323.8091 | 0.0923 | 70 | 189 | 200 | DSAHGFLKVPPR |
| 1476.7516 | 1476.8101 | 0.0585 | 40 | 294 | 306 | CGLVPVLAENYNK |
| 1478.7349 | 1478.8625 | 0.1276 | 86 | 205 | 216 | MYLGYEYVTAIR |
| 1478.7349 | 1478.8625 | 0.1276 | 86 | 205 | 216 | MYLGYEYVTAIR |
| 1491.759 | 1491.8854 | 0.1264 | 85 | 171 | 183 | SKEFQLFSSPHGK |
| 1494.7297 | 1494.8582 | 0.1285 | 86 | 205 | 216 | MYLGYEYVTAIR |
| 1494.7297 | 1494.8582 | 0.1285 | 86 | 205 | 216 | MYLGYEYVTAIR |
| 1531.688 | 1531.8146 | 0.1266 | 83 | 557 | 569 | CSTSSLLEACTFR |
| 1531.688 | 1531.8146 | 0.1266 | 83 | 557 | 569 | CSTSSLLEACTFR |
| 1565.7992 | 1565.9364 | 0.1372 | 88 | 520 | 532 | DLLFRDDTVCLAK |
| 1565.7992 | 1565.9364 | 0.1372 | 88 | 520 | 532 | DLLFRDDTVCLAK |
| 1577.8145 | 1577.8724 | 0.0579 | 37 | 349 | 362 | TAGWNIPMGLLYNK |
| 1586.7744 | 1586.9088 | 0.1344 | 85 | 461 | 473 | KPVEEYANCHLAR |
| 1659.783 | 1659.9326 | 0.1496 | 90 | 556 | 569 | KCSTSSLLEACTFR |
| 1689.849 | 1690.0056 | 0.1566 | 93 | 132 | 146 | DCHLAQVPSHTVVAR |
| 1705.7527 | 1705.9202 | 0.1675 | 98 | 368 | 382 | FDEFFSEGCAPGSKK |
| 1881.876 | 1882.0433 | 0.1673 | 89 | 110 | 124 | ADRDQYELLCLDNTR |
| 1952.9382 | 1953.1014 | 0.1632 | 84 | 445 | 460 | NLNEKDYELLCLDGTR |
| 1952.9382 | 1953.1014 | 0.1632 | 84 | 445 | 460 | NLNEKDYELLCLDGTR |
| 1974.9781 | 1975.1069 | 0.1288 | 65 | 427 | 444 | HQTVPQNTGGKNPDPW |
| | | | | | | AK |
| 2159.0149 | 2159.1621 | 0.1472 | 68 | 273 | 293 | IMNGEADAMSLDGGFVYI |
| | | | | | | AGK |
| 2171.0955 | 2171.3062 | 0.2107 | 97 | 17 | 35 | SAGWNIPIGLLYCDLPEPR |
| 2175.0098 | 2175.0962 | 0.0864 | 40 | 273 | 293 | IMNGEADAMSLDGGFVYI |

| | |
|---|---|
| Project\Project | 2175.096 |
| sample_20120802\P12139- | 2 |
| 2fncbi | |

| | | | | | | |
|---|---|---|---|---|---|---|
| | | | | | | AGK |
| 2258.1321 | 2258.1755 | 0.0434 | 19 | 349 | 367 | TAGWNIPMGLLYNKIN |
| | | | | | | HCR |
| 2549.293 | 2549.4858 | 0.1928 | 76 | 125 | 146 | KPVDEYKDCHLAQVP |
| | | | | | | SH |
| | | | | | | TVVAR |
| 2549.293 | 2549.4858 | 0.1928 | 76 | 125 | 146 | KPVDEYKDCHLAQVP |
| | | | | | | SH |
| | | | | | | TVVAR |
| 2971.3171 | 2971.553 | 0.2359 | 79 | 389 | 414 | LCMGSGLNLCEPNNK |
| | | | | | | EG |
| | | | | | | YYGYTGAFR |
| 2971.3171 | 2971.553 | 0.2359 | 79 | 389 | 414 | LCMGSGLNLCEPNNK |
| | | | | | | EG |
| | | | | | | YYGYTGAFR |
| 2987.312 | 2987.5488 | 0.2368 | 79 | 389 | 414 | LCMGSGLNLCEPNNK |
| | | | | | | EG |
| | | | | | | YYGYTGAFR |

| | | | |
|---|---|---|---|
| Gel Idx/Pos | | 103/E2 | Instr./Gel Origin |
| Plate [#] Name | | [1] Sample Project | Instrument Sample |
| | | 20120802 | Name |
| Rank | Accession No. | Protein Name | |

| | |
|---|---|
| gi\|194380034 | unnamed protein product [Homo sapiens] |
| Protein Group | |
| gi\|6650772 | PRO1400 [Homo sapiens] |

[0773] Peptide Information

| | Obsrv. | | | Start | End | |
|---|---|---|---|---|---|---|
| Calc. Mass | Mass | ±da | ±ppm | Seq. | Seq. | Sequence |
| 887.4152 | 887.4493 | 0.0341 | 38 | 341 | 348 | SCHTAVGR |
| 964.5323 | 964.5878 | 0.0555 | 58 | 474 | 482 | APNHAVVTR |
| 1000.4985 | 1000.5601 | 0.0616 | 62 | 542 | 549 | YLGEEYVK |
| 1175.5803 | 1175.6743 | 0.094 | 80 | 533 | 541 | LHDRNTYEK |
| 1195.5426 | 1195.6356 | 0.093 | 78 | 236 | 244 | WCALSHHER |
| 1249.606 | 1249.7087 | 0.1027 | 82 | 327 | 337 | SASDLTWDNLK |
| 1283.5692 | 1283.6683 | 0.0991 | 77 | 404 | 414 | EGYYGYTGAFR |
| 1283.5692 | 1283.6683 | 0.0991 | 77 | 404 | 414 | EGYYGYTGAFR |
| 1323.7168 | 1323.8109 | 0.0941 | 71 | 189 | 200 | DSAHGFLKVPPR |
| 1377.7009 | 1377.7806 | 0.0797 | 58 | 326 | 337 | KSASDLTWDNLK |
| 1478.7349 | 1478.8579 | 0.123 | 83 | 205 | 216 | MYLGYEYVTAIR |
| 1478.7349 | 1478.8579 | 0.123 | 83 | 205 | 216 | MYLGYEYVTAIR |
| 1494.7297 | 1494.8467 | 0.117 | 78 | 205 | 216 | MYLGYEYVTAIR |
| 1494.7297 | 1494.8467 | 0.117 | 78 | 205 | 216 | MYLGYEYVTAIR |
| 1521.7367 | 1521.8425 | 0.1058 | 70 | 245 | 257 | LKCDEWSVNSVGK |
| 1531.688 | 1531.8191 | 0.1311 | 86 | 557 | 569 | CSTSSLLEACTFR |
| 1531.688 | 1531.8191 | 0.1311 | 86 | 557 | 569 | CSTSSLLEACTFR |
| 1539.7108 | 1539.8378 | 0.127 | 82 | 113 | 124 | DQYELLCLDNTR |
| 1565.7992 | 1565.9386 | 0.1394 | 89 | 520 | 532 | DLLFRDDTVCLAK |
| 1565.7992 | 1565.9386 | 0.1394 | 89 | 520 | 532 | DLLFRDDTVCLAK |
| 1577.8145 | 1577.8429 | 0.0284 | 18 | 349 | 362 | TAGWNIPMGLLYNK |

| | |
|---|---|
| Project\Project | 1577.842 |
| sample_20120802\P12139- | 9 |
| 2fncbi | |

| | | | | | | |
|---|---|---|---|---|---|---|
| 1586.7744 | 1586.9095 | 0.1351 | 85 | 461 | 473 | KPVEEYANCHLAR |
| 1586.7744 | 1586.9095 | 0.1351 | 85 | 461 | 473 | KPVEEYANCHLAR |
| 1659.783 | 1659.9297 | 0.1467 | 88 | 556 | 569 | KCSTSSLLEACTFR |
| 1689.849 | 1689.9705 | 0.1215 | 72 | 132 | 146 | DCHLAQVPSHTVVAR |
| 1705.7527 | 1705.9098 | 0.1571 | 92 | 368 | 382 | FDEFFSEGCAPGSKK |
| 1881.876 | 1882.0377 | 0.1617 | 86 | 110 | 124 | ADRDQYELLCLDNTR |
| 1952.9382 | 1953.1041 | 0.1659 | 85 | 445 | 460 | NLNEKDYELLCLDGTR |
| 1952.9382 | 1953.1041 | 0.1659 | 85 | 445 | 460 | NLNEKDYELLCLDGTR |
| 1974.9781 | 1975.1078 | 0.1297 | 66 | 427 | 444 | HQTVPQNTGGKNPDPW |
| | | | | | | AK |
| 2200.0227 | 2200.2285 | 0.2058 | 94 | 307 | 326 | SDNCEDTPEAGYFAVAV |
| | | | | | | VKK |
| 2201.0325 | 2201.1921 | 0.1596 | 73 | 217 | 235 | NLREGTCPEAPTDECKP |
| | | | | | | VK |
| 2258.1321 | 2258.1638 | 0.0317 | 14 | 349 | 367 | TAGWNIPMGLLYNKINHCR |
| 2549.293 | 2549.4946 | 0.2016 | 79 | 125 | 146 | KPVDEYKDCHLAQVPSH |
| | | | | | | TVVAR |
| 2549.293 | 2549.4946 | 0.2016 | 79 | 125 | 146 | KPVDEYKDCHLAQVPSH |
| | | | | | | TVVAR |
| 2971.3171 | 2971.5352 | 0.2181 | 73 | 389 | 414 | LCMGSGLNLCEPNNKEG |
| | | | | | | YYGYTGAFR |

| | | | |
|---|---|---|---|
| Gel Idx/Pos | | 108/E7 | Instr./Gel Origin |
| Plate [#] Name | | [1] Sample Project | Instrument Sample |
| | | 20120802 | Name |
| Rank | Accession No. | Protein Name | |

| | |
|---|---|
| gi\|194373497 | unnamed protein product [Homo sapiens] |
| | Peptide Information Project\ |
| | Project sample_20120802\ |
| | P12139-2fncbi |

| Calc. | Obsrv. | | | Start | End | |
|---|---|---|---|---|---|---|
| Mass | Mass | ±da | ±ppm | Seq. | Seq. | Sequence |
| 836.4009 | 836.3804 | −0.0205 | −25 | 67 | 73 | GQQYQGR |
| 836.4009 | 836.3804 | −0.0205 | −25 | 67 | 73 | GQQYQGR |
| 1189.579 | 1189.5811 | 0.0021 | 2 | 449 | 457 | YGFYTHVFR |
| 1189.579 | 1189.5811 | 0.0021 | 2 | 449 | 457 | YGFYTHVFR |
| 1194.6001 | 1194.5938 | −0.0063 | −5 | 203 | 212 | ELLESYIDGR |
| 1464.7805 | 1464.7512 | −0.0293 | −20 | 336 | 349 | ETAASLLQAGYKGR |
| 1489.7223 | 1489.7413 | 0.019 | 13 | 446 | 457 | DGKYGFYTHVFR |
| 1489.7223 | 1489.7413 | 0.019 | 13 | 446 | 457 | DGKYGFYTHVFR |
| 1515.8352 | 1515.8251 | −0.0101 | −7 | 290 | 301 | ISMLEKIYIHPR |
| 1518.8275 | 1518.6852 | −0.1423 | −94 | 265 | 277 | NFTENDLLVRIGK |
| 1526.6251 | 1526.655 | 0.0299 | 20 | 410 | 424 | GDACEGDSGGPFVMK |
| 1542.62 | 1542.7037 | 0.0837 | 54 | 410 | 424 | GDACEGDSGGPFVMK |
| 1561.7281 | 1561.7467 | 0.0186 | 12 | 164 | 176 | TATSEYQTFFNPR |
| 1561.7281 | 1561.7467 | 0.0186 | 12 | 164 | 176 | TATSEYQTFFNPR |
| 1645.8214 | 1645.8168 | −0.0046 | −3 | 234 | 248 | SPQELLCGASLISDR |
| 1682.7262 | 1682.7006 | −0.0256 | −15 | 409 | 424 | RGDACEGDSGGPFVMK |
| 1860.9603 | 1860.9722 | 0.0119 | 6 | 350 | 366 | VTGWGNLKETWTANVGK |
| 1883.8956 | 1883.9106 | 0.015 | 8 | 177 | 193 | TFGSGEADCGLRPLFEK |
| 1883.8956 | 1883.9106 | 0.015 | 8 | 177 | 193 | TFGSGEADCGLRPLFEK |
| 1963.908 | 1963.8922 | −0.0158 | −8 | 97 | 112 | HQDFNSAVQLVENFCR |
| 1995.0481 | 1995.0499 | 0.0018 | 1 | 74 | 92 | LAVTTHGLPCLAWASAQ |
| | | | | | | AK |
| 1995.0481 | 1995.0499 | 0.0018 | 1 | 74 | 92 | LAVTTHGLPCLAWASAQ |
| | | | | | | AK |
| 2001.9158 | 2001.9205 | 0.0047 | 2 | 393 | 409 | ITDNMFCAGYKPDEGKR |
| 2011.9906 | 2012.0179 | 0.0273 | 14 | 177 | 194 | TFGSGEADCGLRPLFEKK |
| 2011.9906 | 2012.0179 | 0.0273 | 14 | 177 | 194 | TFGSGEADCGLRPLFEKK |
| 2017.9106 | 2018.0586 | 0.148 | 73 | 393 | 409 | ITDNMFCAGYKPDEGKR |
| 2232.2534 | 2232.2668 | 0.0134 | 6 | 367 | 386 | GQPSVLQVVNLPIVERPV |
| | | | | | | CK |
| 2232.2534 | 2232.2668 | 0.0134 | 6 | 367 | 386 | GQPSVLQVVNLPIVERPV |
| | | | | | | CK |
| 2281.0991 | 2281.1819 | 0.0828 | 36 | 213 | 232 | IVEGSDAEIGMSPWQVM |
| | | | | | | LFR |
| 2888.3591 | 2888.3918 | 0.0327 | 11 | 48 | 73 | SEGSSVNLSPPLEQCVP |
| | | | | | | DRGQQYQGR |
| 2888.3591 | 2888.3918 | 0.0327 | 11 | 48 | 73 | SEGSSVNLSPPLEQCVP |
| | | | | | | DRGQQYQGR |

### Figure Descriptions

[0774] FIG. 13A—2D Electrophoresis of Anti Thrombin III

[0775] FIG. 13B—2D Electrophoresis of CP98

[0776] FIG. 13C—2D Electrophoresis of Transferrin

[0777] FIG. 13D—2D Electrophoresis of α1-Anti Trypsin

[0778] FIG. 13E—2D Electrophoresis of Human Albumin after pasteurization from Fraction IV

[0779] FIG. 13F—2D Electrophoresis of AFCC®

[0780] Along with these three newly discovered proteins for all the products derived from fraction IV, we have found the following existing discovered proteins from Anti Thrombin III in which in which good KH healthy cells exist from Anti Thrombin III protein and their sequence:
[0781] Chain A, The Intact And Cleaved Human Antithrombin III
[0782] Beta-2-glycoprotein I
[0783] hCG1646813
[0784] Creatine kinase, muscle
[0785] Similar to ring finger protein 40

### FIG. 13A

| | | | |
|---|---|---|---|
| Gel Idx/Pos | | 93/D18 | Instr./Gel Origin |
| Plate [#] Name | | [1] Sample Project | Instrument Sample |
| | | 20120802 | Name |
| Rank | Accession No. | Protein Name | |

| | |
|---|---|
| gi\|28580349 | Chain I, Crystal Structure Of |
| | The Antithrombin-Factor 4 |
| | Ixa-Pentasaccharide Complex |
| Protein Group | |
| gi\|999513 | Chain A, The Intact And |
| | Cleaved Human Antithrombin |
| | Iii Complex As A Model |
| | For Serpin-Proteinase Interactions |

[0787] Peptide Information

| | Obsrv. | | | Start | End | |
|---|---|---|---|---|---|---|
| Calc. Mass | Mass | ±da | ±ppm | Seq. | Seq. | Sequence |
| 917.5203 | 917.4625 | −0.0578 | −63 | 47 | 53 | RVWELSK |
| 1065.5323 | 1065.4781 | −0.0542 | −51 | 227 | 235 | SKFSPENTR |
| 1175.6532 | 1175.6271 | −0.0261 | −22 | 394 | 403 | SLNPNRVTFK |
| 1211.642 | 1211.6008 | −0.0412 | −34 | 323 | 332 | FRIEDGFSLK |
| 1211.642 | 1211.6008 | −0.0412 | −34 | 323 | 332 | FRIEDGFSLK |
| 1232.7263 | 1232.6871 | −0.0392 | −32 | 404 | 413 | ANRPFLVFIR |
| 1232.7263 | 1232.6871 | −0.0392 | −32 | 404 | 413 | ANRPFLVFIR |
| 1340.6635 | 1340.6451 | −0.0184 | −14 | 115 | 125 | TSDQIHFFFAK |
| 1340.6635 | 1340.6451 | −0.0184 | −14 | 115 | 125 | TSDQIHFFFAK |
| 1389.7559 | 1389.731 | −0.0249 | −18 | 414 | 425 | EVPLNTIIFMGR |
| 1389.7559 | 1389.731 | −0.0249 | −18 | 414 | 425 | EVPLNTIIFMGR |

[0788] Project\Project sample_{—}20120802\P12139-2fncbi

| | | | | | | |
|---|---|---|---|---|---|---|
| 1405.7509 | 1405.7101 | −0.0408 | −29 | 414 | 425 | EVPLNTIIFMGR |
| 1409.6375 | 1409.589 | −0.0485 | −34 | 14 | 24 | DIPMNPMCIYR |
| 1409.6375 | 1409.589 | −0.0485 | −34 | 14 | 24 | DIPMNPMCIYR |
| 1425.6323 | 1425.6094 | −0.0229 | −16 | 14 | 24 | DIPMNPMCIYR |
| 1425.6323 | 1425.6094 | −0.0229 | −16 | 14 | 24 | DIPMNPMCIYR |
| 1437.7268 | 1437.6921 | −0.0347 | −24 | 1 | 13 | HGSPVDICTAKPR |
| 1437.7268 | 1437.6921 | −0.0347 | −24 | 1 | 13 | HGSPVDICTAKPR |
| 1441.6273 | 1441.6387 | 0.0114 | 8 | 14 | 24 | DIPMNPMCIYR |
| 1528.7432 | 1528.736 | −0.0072 | −5 | 58 | 70 | FATTFYQHLADSK |
| 1674.8446 | 1674.7909 | −0.0537 | −32 | 170 | 183 | LQPLDFKENA |
| | | | | | | EQSR |
| 1674.8446 | 1674.7909 | −0.0537 | −32 | 170 | 183 | LQPLDFKENAE |
| | | | | | | QSR |
| 1708.0057 | 1707.9534 | −0.0523 | −31 | 400 | 413 | VTFKANRPFL |
| | | | | | | VFIR |
| 2202.1189 | 2202.054 | −0.0649 | −29 | 351 | 370 | LPGIVAEGRD |
| | | | | | | DLYVSDAFHK |
| 2291.1514 | 2291.0154 | −0.136 | −59 | 371 | 393 | AFLEVNEEGSE |
| | | | | | | AAASTAV |

| | | | |
|---|---|---|---|
| Gel Idx/Pos | | 94/D19 | Instr./Gel Origin |
| Plate [#] Name | | [1] Sample Project | Instrument Sample |
| | | 20120802 | Name |
| Rank | Accession No. | Protein Name | |

| | |
|---|---|
| gi\|300253216 | beta-2-glycoprotein I [Homo sapiens] |
| Protein Group | |
| gi\|6573461 | Chain A, Crystal Structure Of |
| | Human Beta-2-Glycoprotein-I |
| | (Apolipoprotein-H) |

[0789] Peptide Information

| | Obsrv. | | | Start | End | |
|---|---|---|---|---|---|---|
| Calc. Mass | Mass | ±da | ±ppm | Seq. | Seq. | Sequence |
| 1022.5266 | 1022.4513 | −0.0753 | −74 | 252 | 260 | ATVVYQGER |
| 1022.5266 | 1022.4513 | −0.0753 | −74 | 252 | 260 | ATVVYQGER |
| 1104.5472 | 1104.4421 | −0.1051 | −95 | 309 | 317 | EHSSLAFWK |
| 1150.6216 | 1150.5341 | −0.0875 | −76 | 251 | 260 | KATVVYQGER |
| 1249.6899 | 1249.6323 | −0.0576 | −46 | 252 | 262 | ATVVYQGERVK |
| 1502.7784 | 1502.6923 | −0.0861 | −57 | 64 | 77 | VCPFAGILENGAVR |

[0790] Project\Project sample_{—}20120802\P12139-2fncbi

| | | | | | | |
|---|---|---|---|---|---|---|
| 1502.7784 | 1502.6923 | −0.0861 | −57 | 64 | 77 | VCPFAGILEN |
| | | | | | | GAVR |
| 1539.7413 | 1539.6655 | −0.0758 | −49 | 306 | 317 | CFKEHSSLAFWK |
| 2127.1267 | 2126.9858 | −0.1409 | −66 | 1 | 19 | GRTCPKPDDLPF |
| | | | | | | STVVPLK |
| 2383.0911 | 2382.9473 | −0.1438 | −60 | 20 | 39 | TFYEPGEEIT |
| | | | | | | YSCKPGYVSR |
| 2731.3337 | 2731.199 | −0.1347 | −49 | 186 | 208 | CPFPSRPDNG |
| | | | | | | FVNYPAKPTLYYK |
| 2974.4556 | 2974.2261 | −0.2295 | −77 | 186 | 210 | CPFPSRPD |
| | | | | | | NGFVNYPAK |

| Gel Idx/Pos | | 95/D20 | Instr./Gel Origin |
|---|---|---|---|
| Plate [#] Name | | [1] Sample Project | Instrument |
| | | 20120802 | Sample Name |
| Rank | Accession No. | Protein Name | |
| | gi\|119622576 | hCG1646813 | |
| | | [Homo sapiens] | |

[0791] Peptide Information

| | Obsrv. | | | Start | End | |
|---|---|---|---|---|---|---|
| Calc. Mass | Mass | ±da | ±ppm | Seq. | Seq. | Sequence |
| 842.3978 | 842.4335 | 0.0357 | 42 | 33 | 39 | GPMHWSK |
| 1428.8461 | 1428.8052 | −0.0409 | −29 | 103 | 116 | LIGVFLDSGLVPAK |
| 1956.8352 | 1956.936 | 0.1008 | 52 | 2 | 18 | GCAQQQTTEEYRDGADK |
| 1960.1073 | 1960.0238 | −0.0835 | −43 | 62 | 81 | SGTTKLEALAGIALLATSSR |
| 1960.1073 | 1960.0238 | −0.0835 | −43 | 62 | 81 | SGTTKLEALAGIALLATSSR |

| Gel Idx/Pos | | 96/D21 | Instr./Gel Origin |
|---|---|---|---|
| Plate [#] Name | | [1] Sample Project | Instrument |
| | | 20120802 | Sample Name |
| Rank | Accession No. | Protein Name | |
| | gi\|119577741 | creatine kinase, | |
| | | muscle [Homo | |
| | | sapiens] | |

[0792] Peptide Information

| | Obsrv. | | | Start | End | |
|---|---|---|---|---|---|---|
| Calc. Mass | Mass | ±da | ±ppm | Seq. | Seq. | Sequence |
| 851.394 | 851.379 | −0.015 | −18 | 51 | 57 | HNNHMAK |
| | 851.379 | | | | | |

[0793] Project\Project sample_{—}20120802\P12139-2fncbi

| | | | | | | |
|---|---|---|---|---|---|---|
| 868.4927 | 868.5339 | 0.0412 | 47 | 196 | 202 | GKYYPLK |
| 907.4883 | 907.4175 | −0.0708 | −78 | 333 | 339 | FEEILTR |
| 907.4883 | 907.4175 | −0.0708 | −78 | 333 | 339 | FEEILTR |
| 1507.7024 | 1507.5952 | −0.1072 | −71 | 142 | 155 | GGDDLD |
| | | | | | | PNYVLSSR |
| 1643.8176 | 1643.7117 | −0.1059 | −64 | 249 | 261 | SFLVWVNE |
| | | | | | | EDHLR |
| 1994.9415 | 1994.7739 | −0.1676 | −84 | 346 | 366 | GTGGVDTA |
| | | | | | | AVGSVFDVSNA |
| | | | | | | DR |
| 1994.9415 | 1994.7739 | −0.1676 | −84 | 346 | 366 | GTGGVDTAA |
| | | | | | | VGSVFDVS |

| Gel Idx/Pos | | 97/D22 | Instr./Gel Origin |
|---|---|---|---|
| Plate [#] Name | | [1] Sample Project | Instrument |
| | | 20120802 | Sample Name |
| Rank | Accession No. | Protein Name | |
| | gi\|28175093 | Similar to ring | |
| | | finger protein 40 | |
| | | [Homo sapiens] | |

[0794] Peptide Information

| Calc. | Obsrv. | | | Start | End | |
|---|---|---|---|---|---|---|
| Mass | Mass | ±da | ±ppm | Seq. | Seq. | Sequence |
| 1257.6686 | 1257.697 | 0.0284 | 23 | 523 | 534 | AVEAAQLAEDLK |
| 1385.7634 | 1385.673 | −0.0904 | −65 | 522 | 534 | KAVEAAQLAEDLK |
| 1649.8718 | 1649.7906 | −0.0812 | −49 | 390 | 402 | IRQAEEQIEHLQR |
| 1663.8286 | 1663.7806 | −0.048 | −29 | 36 | 49 | SLPEEVVRETGEYR |
| 1681.785 | 1681.7722 | −0.0128 | −8 | 86 | 99 | HIEHMESDELGLQK |
| 1748.9099 | 1748.7834 | −0.1265 | −72 | 223 | 239 | EMAPVPGTTTTTTSVKK |
| 1748.9099 | 1748.7834 | −0.1265 | −72 | 222 | 238 | KEMAPVPGTTTTTTSVK |
| 1773.7771 | 1773.8884 | 0.1113 | 63 | 623 | 635 | CFHVFCFECVRGR |
| 1801.9476 | 1801.9485 | 0.0009 | 0 | 10 | 25 | MAELEKLQAELQGAVR |

[0795] Project\Project sample_{—}20120802\P12139-2fncbi

| | | | | | | |
|---|---|---|---|---|---|---|
| 1819.9661 | 1819.937 | −0.0291 | −16 | 276 | 293 | EREGPSLGPPPVA |
| | | | | | | SALSR |
| 1819.9661 | 1819.937 | −0.0291 | −16 | 276 | 293 | EREGPSLGPPPV |
| | | | | | | ASALSR |
| 2348.2568 | 2348.1741 | −0.0827 | −35 | 523 | 543 | AVEAAQLAEDLK |
| | | | | | | VQLEHV |

[0796] Along with these three newly discovered proteins for all the products derived from fraction IV, we have found the following existing discovered proteins from CP98 in which in which good KH healthy cells exist from CP98 protein and their sequence:
[0797] Chain A, Alpha-1-Antitrypsin
[0798] Chain A, Tertiary Structures Of Three Amyloidogenic Transthyretin Variants And Implications For Amyloid Fibril Formation

### FIG. 13B

[0799] Protein Group

| Gel Idx/Pos | | 98/D23 | Instr./Gel Origin |
|---|---|---|---|
| Plate [#] Name | | [1] Sample Project | Instrument |
| | | 20120802 | Sample Name |
| Rank | Accession No. | Protein Name | |
| | gi\|196049621 | Chain A, Crystal | |
| | | Structure Of Alpha- | |
| | | 1-Antitrypsin, | |
| | | Crystal Form A | |
| | gi\|157831596 | Chain A, Alpha1- | |
| | | Antitrypsin | |

[0800] Peptide Information

| | Obsrv. | | | Start | End | |
|---|---|---|---|---|---|---|
| Calc. Mass | Mass | ±da | ±ppm | Seq. | Seq. | Sequence |
| 1008.4996 | 1008.4 | −0.0996 | −99 | 156 | 163 | QINDYVEK |
| 1058.475 | 1058.3909 | −0.0841 | −79 | 1 | 10 | EDPQGDAAQK |
| 1058.475 | 1058.3909 | −0.0841 | −79 | 1 | 10 | EDPQGDAAQK |
| 1136.5946 | 1136.5233 | −0.0713 | −63 | 155 | 163 | KQINDYVEK |
| 1275.6844 | 1275.583 | −0.1014 | −79 | 192 | 201 | GKWERPFEVK |
| 1479.7438 | 1479.6862 | −0.0576 | −39 | 156 | 168 | QINDYVEKGTQGK |
| 1641.8635 | 1641.8329 | −0.0306 | −19 | 26 | 39 | ITPNLAEFAFSLYR |
| 1641.8635 | 1641.8329 | −0.0306 | −19 | 26 | 39 | ITPNLAEFAFSLYR |
| 1779.7682 | 1779.7164 | −0.0518 | −29 | 11 | 25 | TDTSHHDQDHPTFNK |
| 1779.7682 | 1779.7164 | −0.0518 | −29 | 11 | 25 | TDTSHHDQDHPTFNK |
| 1891.8557 | 1891.8124 | −0.0433 | −23 | 202 | 217 | DTEEEDFHVDQVTTVK |
| 1891.8557 | 1891.8124 | −0.0433 | −23 | 202 | 217 | DTEEEDFHVDQVTTVK |
| 2186.04 | 2186.03 | −0.01 | −5 | 137 | 155 | LYHSEAFTVNFGDTEEAKK |
| 2186.04 | 2186.03 | −0.01 | −5 | 137 | 155 | LYHSEAFTVNFGDTEEAKK |
| 2574.3411 | 2574.3967 | 0.0556 | 22 | 102 | 125 | TLNQPDSQLQLTTGNGL |
| | | | | | | FLSEGLK |
| 2574.3411 | 2574.3967 | 0.0556 | 22 | 102 | 125 | TLNQPDSQLQLTTGNGL |
| | | | | | | FLSEGLK |

| Gel Idx/Pos | | 99/D24 | Instr./Gel Origin |
|---|---|---|---|
| Plate [#] | | [1] Sample Project | Instrument |
| Name | | 20120802 | Sample Name |
| Rank | Accession No. | Protein Name | |
| | gi\|3891560 | Chain A, Tertiary | |
| | | Structures Of Three | |
| | | Amyloidogenic | |
| | | Transthyretin Variants | |
| | | And Implications | |
| | | For Amyloid | |
| | | Fibril Formation | |

[0801] Peptide Information

| Calc. | Obsrv. | | | Start | End | |
|---|---|---|---|---|---|---|
| Mass | Mass | ±da | ±ppm | Seq. | Seq. | Sequence |
| 863.4105 | 863.3267 | −0.0838 | −97 | 1 | 9 | GPTGTSESK |
| 1394.6223 | 1394.5464 | −0.0759 | −54 | 36 | 48 | AADDTWEPFASGK |
| 1394.6223 | 1394.5464 | −0.0759 | −54 | 36 | 48 | AADDTWEPFASGK |
| 1494.854 | 1494.7693 | −0.0847 | −57 | 22 | 35 | GSPAINVAVHVFRK |
| 1522.7173 | 1522.6631 | −0.0542 | −36 | 35 | 48 | KAADDTWEPFASGK |
| 1522.7173 | 1522.6631 | −0.0542 | −36 | 35 | 48 | KAADDTWEPFASGK |
| 2451.2053 | 2451.0967 | −0.1086 | −44 | 81 | 103 | ALGISPFHEHAEVVFTAN |
| | | | | | | DSGPR |

[0802] Project\Project sample_{—}20120802\P12139-2fncbi

| | | | | | | |
|---|---|---|---|---|---|---|
| 2451.2053 | 2451.0967 | −0.1086 | −44 | 81 | 103 | ALGISPFHEHAEV |
| | | | | | | VFTANDSGPR |
| 2455.1511 | 2455.0598 | −0.0913 | −37 | 49 | 70 | TSESGELHGLTT |
| | | | | | | EEEFVEGIYK |
| 2607.3064 | 2607.1531 | −0.1533 | −59 | 81 | 104 | ALGISPFHEHAEV |
| | | | | | | VFTANDSGPRR |
| 3140.5159 | 3140.3345 | −0.1814 | −58 | 49 | 76 | TSESGELHGLTTE |
| | | | | | | EEFVEGIYKVEI |
| | | | | | | DTK |
| 3140.5159 | 3140.3345 | −0.1814 | −58 | 49 | 76 | TSESGELHGLTTE |
| | | | | | | EEFVEGIYKVEI |
| | | | | | | DTK |

[0803] Along with these three newly discovered proteins for all the products derived from fraction IV, we have found the following existing discovered proteins from Transferrin in which in which good KH healthy cells exist from Transferrin protein and their sequence:
[0804] KH54
[0805] KH55
[0806] Chain A, Apo-Human Serum Transferrin (Glycosylated)
[0807] hemopexin, isoform CRA_c

### FIG. 13C

| Gel Idx/Pos | | 104/E3 | Instr./Gel Origin |
|---|---|---|---|
| Plate [#] Name | | [1] Sample Project | Instrument |
| | | 20120802 | Sample Name |
| Rank | Accession No. | Protein Name | |
| | gi\|110590599 | Chain A, Apo- | |
| | | Human Serum | |
| | | Transferrin | |
| | | (Glycosylated) | |

[0809] Peptide information

| Calc. | Obsrv. | | | Start | End | |
|---|---|---|---|---|---|---|
| Mass | Mass | ±da | ±ppm | Seq. | Seq. | Sequence |
| 874.4417 | 874.445 | 0.0033 | 4 | 294 | 301 | DSAHGFLK |
| 887.4152 | 887.4274 | 0.0122 | 14 | 446 | 453 | SCHTAVGR |
| 997.4771 | 997.5176 | 0.0405 | 41 | 40 | 47 | ASYLDCIR |
| 997.4771 | 997.5176 | 0.0405 | 41 | 40 | 47 | ASYLDCIR |
| 1125.5721 | 1125.6246 | 0.0525 | 47 | 39 | 47 | KASYLD |
| | | | | | | CIR |

[0810] Project\Project sample_{—}20120802T12139-2fncbi

| | | | | | | |
|---|---|---|---|---|---|---|
| 1125.6198 | 1125.6246 | 0.0048 | 4 | 591 | 599 | EACVHKILR |
| 1195.5525 | 1195.6206 | 0.0681 | 57 | 101 | 110 | DSGFQMNQLR |
| 1195.5525 | 1195.6206 | 0.0681 | 57 | 101 | 110 | DSGFQMNQLR |
| 1208.5299 | 1208.5984 | 0.0685 | 57 | 16 | 24 | CQSFRDHMK |
| 1211.5474 | 1211.606 | 0.0586 | 48 | 101 | 110 | DSGFQMNQLR |
| 1211.5474 | 1211.606 | 0.0586 | 48 | 101 | 110 | DSGFQMNQLR |
| 1224.5249 | 1224.5942 | 0.0693 | 57 | 16 | 24 | CQSFRDHMK |
| 1249.606 | 1249.6862 | 0.0802 | 64 | 432 | 442 | SASDLTWDNLK |
| 1317.5892 | 1317.6625 | 0.0733 | 56 | 5 | 15 | WCAVSEHEATK |
| 1323.7168 | 1323.748 | 0.0312 | 24 | 294 | 305 | DSAHGFLKVPPR |
| 1323.7168 | 1323.748 | 0.0312 | 24 | 294 | 305 | DSAHGFLKVPPR |
| 1339.6423 | 1339.714 | 0.0717 | 54 | 100 | 110 | KDSGFQMNQLR |
| 1379.6989 | 1379.7874 | 0.0885 | 64 | 191 | 203 | CLKDGAGDVAFVK |
| 1415.72 | 1415.8167 | 0.0967 | 68 | 25 | 38 | SVIPSDGPSVACVK |
| 1478.7349 | 1478.8274 | 0.0925 | 63 | 310 | 321 | MYLGYEYVTAIR |
| 1478.7349 | 1478.8274 | 0.0925 | 63 | 310 | 321 | MYLGYEYVTAIR |
| 1494.7297 | 1494.8149 | 0.0852 | 57 | 310 | 321 | MYLGYEYVTAIR |
| 1494.7297 | 1494.8149 | 0.0852 | 57 | 310 | 321 | MYLGYEYVTAIR |
| 1521.7367 | 1521.8673 | 0.1306 | 86 | 350 | 362 | LKCDEWSVNSVGK |
| 1817.8044 | 1817.906 | 0.1016 | 56 | 325 | 340 | EGTCPEAPTDECK |
| | | | | | | PVK |
| 1881.876 | 1881.9436 | 0.0676 | 36 | 215 | 229 | ADRDQYELLCL |
| | | | | | | DNTR |
| 2071.9277 | 2072.0383 | 0.1106 | 53 | 412 | 430 | SDNCEDTPEAGYF |
| | | | | | | AVAVVK |
| 2159.0149 | 2159.1138 | 0.0989 | 46 | 378 | 398 | IMNGEADAMSLDG |
| | | | | | | GFVYIAGK |
| 2171.0955 | 2171.231 | 0.1355 | 62 | 122 | 140 | SAGWNIPIGLLYC |
| | | | | | | DLPEPR |
| 2175.0098 | 2175.1689 | 0.1591 | 73 | 378 | 398 | IMNGEADAMSLDG |
| | | | | | | GFVYIAGK |
| 2191.0046 | 2191.0989 | 0.0943 | 43 | 378 | 398 | IMNGEADAMSLDG |
| | | | | | | GFVYIAGK |
| 2201.0325 | 2201.1443 | 0.1118 | 51 | 322 | 340 | NLREGTCPEAPTD |
| | | | | | | ECKPVK |
| 2549.293 | 2549.4204 | 0.1274 | 50 | 230 | 251 | KPVDEYKDCHLAQ |
| | | | | | | VPSHTVVAR |
| 2549.293 | 2549.4204 | 0.1274 | 50 | 230 | 251 | KPVDEYKDCHLAQ |
| | | | | | | VPSHTVVAR |

| Gel Idx/Pos | | 105/E4 | Instr./Gel Origin |
|---|---|---|---|
| Plate [#] Name | | [1] Sample Project | Instrument |
| | | 20120802 | Sample Name |
| Rank | Accession No. | Protein Name | |
| | gi\|119589126 | hemopexin, isoform | |
| | | CRA_c | |
| | | [Homo sapiens] | |

[0811] Peptide Information

| | | | | Start | End | |
|---|---|---|---|---|---|---|
| Calc. Mass | Obsrv. Mass | ±da | ±ppm | Seq. | Seq. | Sequence |
| 813.4399 | 813.4396 | −0.0003 | 0 | 170 | 176 | LHIMAGR |
| 813.4399 | 813.4396 | −0.0003 | 0 | 170 | 176 | LHIMAGR |
| 953.5461 | 953.564 | 0.0179 | 19 | 170 | 177 | LHIMAGRR |
| 969.5411 | 969.6055 | 0.0644 | 66 | 170 | 177 | LHIMAGRR |
| 1022.4645 | 1022.4827 | 0.0182 | 18 | 201 | 209 | VDGALCMEK |
| 1038.4595 | 1038.5132 | 0.0537 | 52 | 201 | 209 | VDGALCMEK |
| 1129.6517 | 1129.6848 | 0.0331 | 29 | 177 | 184 | RLWWLDLK |
| 1141.5889 | 1141.6267 | 0.0378 | 33 | 131 | 141 | GGYTLVSGYPK |
| 1141.5889 | 1141.6267 | 0.0378 | 33 | 131 | 141 | GGYTLVSGYPK |
| 1837.8868 | 1837.9629 | 0.0761 | 41 | 185 | 200 | SGAQATWTELPWPHEK |
| 1837.8868 | 1837.9629 | 0.0761 | 41 | 185 | 200 | SGAQATWTELPWPHEK |
| 1851.7939 | 1851.9684 | 0.1745 | 94 | 38 | 54 | NGTGHGNSTHHGPEYMR |

[0812] Project\Project sample_{—}20120802\P12139-2fncbi

| | | | | | | |
|---|---|---|---|---|---|---|
| 2498.2344 | 2498.3313 | 0.0969 | 39 | 146 | 169 | EVGTPHGIILDSVDAAFIC |
| | | | | | | PGSSR |
| 2498.2344 | 2498.3313 | 0.0969 | 39 | 146 | 169 | EVGTPHGIILDSVDAAFIC |
| | | | | | | PGSSR |
| 2821.2349 | 2821.5139 | 0.279 | 99 | 1 | 24 | MGPGVNLREMEEFPQPC |
| | | | | | | GCCIPSR |
| 2841.3335 | 2841.427 | 0.0935 | 33 | 185 | 209 | SGAQATWTELPWPHEKV |
| | | | | | | DGALCMEK |
| 2853.2246 | 2853.4355 | 0.2109 | 74 | 1 | 24 | MGPGVNLREMEEFPQPC |
| | | | | | | GCCIPSR |
| 2857.3284 | 2857.0476 | −0.2808 | −98 | 185 | 209 | SGAQATWTELPWPHEKV |
| | | | | | | DGALCMEK |
| 2857.3284 | 2857.4575 | 0.1291 | 45 | 185 | 209 | SGAQATWTELPWPHEKV |
| | | | | | | DGALCMEK |
| 3282.5195 | 3282.6726 | 0.1531 | 47 | 210 | 239 | SLGPNSCSANGPGLYLIH |
| | | | | | | GPNLYCYSDVEK |
| 3779.8157 | 3779.9861 | 0.1704 | 45 | 210 | 244 | SLGPNSCSANGPGLYLIH |
| | | | | | | GPNLYCYSDVEKLNAAK |
| 3779.8157 | 3779.9861 | 0.1704 | 45 | 210 | 244 | SLGPNSCSANGPGLYLIH |
| | | | | | | GPNLYCYSDVEKLNAAK |

[0813] Along with these three newly discovered proteins for all the products derived from fraction IV, we have found the following existing discovered proteins from α1-Anti Trypsin in which in which good KH healthy cells exist from α1-Anti Trypsin protein and their sequence:
[0814] Alpha-1-Antitrypsin

### FIG. 13D

| Gel Idx/Pos | | 106/E5 | Instr./Gel Origin |
|---|---|---|---|
| Plate [#] Name | | [1] Sample Project | Instrument |
| | | 20120802 | Sample Name |
| Rank | Accession No. | Protein Name | |
| | gi\|6137432 | Chain A, 2.0 | |
| | | Angstrom Structure | |
| | | Of Intact | |
| | | Alpha-1- | |
| | | Antitrypsin: A | |
| | | Canonical Template | |
| | | For Active Serpins | |

[0816] Peptide Information

| Calc. | Obsrv. | | | Start | End | |
|---|---|---|---|---|---|---|
| Mass | Mass | ±da | ±ppm | Seq. | Seq. | Sequence |
| 1078.5276 | 1078.5848 | 0.0572 | 53 | 275 | 282 | FLENEDRR |
| 1078.5276 | 1078.5848 | 0.0572 | 53 | 275 | 282 | FLENEDRR |
| 1204.7123 | 1204.7484 | 0.0361 | 30 | 234 | 243 | KLSSWVLL |
| | | | | | | MK |
| 1247.6024 | 1247.6445 | 0.0421 | 34 | 224 | 233 | LGMFNIQH |
| | | | | | | CK |
| 1275.6844 | 1275.7573 | 0.0729 | 57 | 192 | 201 | GKWERPFE |
| | | | | | | VK |
| 1275.6844 | 1275.7573 | 0.0729 | 57 | 192 | 201 | GKWERPFE |
| | | | | | | VK |
| 1403.7035 | 1403.7723 | 0.0688 | 49 | 223 | 233 | RLGMFNIQ |
| | | | | | | HCK |

[0817] Project\Project sample_{—}20120802\P12139-2fncbi

| | | | | | | |
|---|---|---|---|---|---|---|
| 1641.8635 | 1641.9781 | 0.1146 | 70 | 26 | 39 | ITPNLAEFAFSLYR |
| 1641.8635 | 1641.9781 | 0.1146 | 70 | 26 | 39 | ITPNLAEFAFSLYR |
| 1779.7682 | 1779.8448 | 0.0766 | 43 | 11 | 25 | TDTSHHDQDHPTFNK |
| 1855.9775 | 1856.0656 | 0.0881 | 47 | 366 | 380 | FNKPFVFLMIEQNTK |
| 1871.9724 | 1872.0657 | 0.0933 | 50 | 366 | 380 | FNKPFVFLMIEQNTK |
| 2057.9451 | 2057.9675 | 0.0224 | 11 | 137 | 154 | LYHSEAFTVNFGDTEEAK |
| 2090.0957 | 2090.1877 | 0.092 | 44 | 175 | 191 | ELDRDTVFALVNYIFFK |
| 2186.04 | 2186.1306 | 0.0906 | 41 | 137 | 155 | LYHSEAFTVNFGDTEEAKK |
| 2186.04 | 2186.1306 | 0.0906 | 41 | 137 | 155 | LYHSEAFTVNFGDTEEAKK |
| 2259.1399 | 2259.2156 | 0.0757 | 34 | 344 | 365 | GTEAAGAMFLEAIPMSIP |
| | | | | | | PEVK |
| 2259.1399 | 2259.2156 | 0.0757 | 34 | 344 | 365 | GTEAAGAMFLEAIPMSIP |
| | | | | | | PEVK |
| 2574.3411 | 2574.5083 | 0.1672 | 65 | 102 | 125 | TLNQPDSQLQLTTGNGL |
| | | | | | | FLSEGLK |
| 2963.4058 | 2963.5151 | 0.1093 | 37 | 194 | 217 | WERPFEVKDTEEEDFHV |
| | | | | | | DQVTTVK |
| 3128.6257 | 3128.7175 | 0.0918 | 29 | 336 | 365 | AVLTIDEKGTEAAGAMFL |
| | | | | | | EAIPMSIPPEVK |
| 3160.6157 | 3160.6826 | 0.0669 | 21 | 336 | 365 | AVLTIDEKGTEAAGAMFL |
| | | | | | | EAIPMSIPPEVK |
| 3181.635 | 3181.6121 | −0.0229 | −7 | 40 | 69 | QLAHQSNSTNIFFSPVSIA |
| | | | | | | TAFAMLSLGTK |

[0818] Along with these three newly discovered proteins for all the products derived from fraction IV, we have found the following existing discovered proteins from Human Albumin after pasteurization in which in which good KH healthy cells exist Human Albumin after pasteurization protein and their sequence:
[0819] Chain A, 2.0 Angstrom Structure Of IntactAlpha-1-Antitrypsin

### FIG. 13C

| Gel Idx/Pos | | 107/E6 | Instr./Gel Origin |
|---|---|---|---|
| Plate [#] | | [1] Sample Project | Instrument |
| Name | | 20120802 | Sample Name |
| Rank | Accession No. | Protein Name | |
| | gi\|6137432 | Chain A, 2.0 | |
| | | Angstrom Structure | |
| | | Of Intact | |
| | | Alpha-1-Antitrypsin: | |
| | | A Canonical | |
| | | Template For Active | |
| | | Serpins | |
| | Protein Group | | |
| | gi\|157831596 | Chain A, Alpha1- | |
| | | Antitrypsin | |

[0821] Peptide Information

| | Obsrv. | | | Start | End | |
|---|---|---|---|---|---|---|
| Calc. Mass | Mass | ±da | ±ppm | Seq. | Seq. | Sequence |
| 1076.6173 | 1076.589 | −0.0283 | −26 | 235 | 243 | LSSWVLLMK |
| 1078.5276 | 1078.5682 | 0.0406 | 38 | 275 | 282 | FLENEDRR |
| 1078.5276 | 1078.5682 | 0.0406 | 38 | 275 | 282 | FLENEDRR |
| 1247.6024 | 1247.6372 | 0.0348 | 28 | 224 | 233 | LGMFNIQHCK |
| 1263.5973 | 1263.65 | 0.0527 | 42 | 224 | 233 | LGMFNIQHCK |
| 1323.7631 | 1323.6909 | −0.0722 | −55 | 332 | 343 | AVHKAVLTIDEK |
| 1641.8635 | 1641.8929 | 0.0294 | 18 | 26 | 39 | ITPNLAEFAFSLYR |
| 1641.8635 | 1641.8929 | 0.0294 | 18 | 26 | 39 | ITPNLAEFAFSLYR |
| 1779.7682 | 1779.7826 | 0.0144 | 8 | 11 | 25 | TDTSHHDQDHPTFNK |
| 1779.7682 | 1779.7826 | 0.0144 | 8 | 11 | 25 | TDTSHHDQDHPTFNK |
| 1803.96 | 1804.0195 | 0.0595 | 33 | 260 | 274 | LQHLENELTHDIITK |
| 1833.923 | 1833.8859 | −0.0371 | −20 | 311 | 328 | VFSNGADLSGVTEEAPLK |
| 1855.9775 | 1855.9918 | 0.0143 | 8 | 366 | 380 | FNKPFVFLMIEQNTK |
| 1891.8557 | 1891.8741 | 0.0184 | 10 | 202 | 217 | DTEEEDFHVDQVTTVK |
| 2186.04 | 2186.0742 | 0.0342 | 16 | 137 | 155 | LYHSEAFTVNFGDTEEAKK |
| 2186.04 | 2186.0742 | 0.0342 | 16 | 136 | 154 | KLYHSEAFTVNFGDTEEAK |

[0822] Project\Project sample_{—}20120802\P12139-2fncbi

| | | | | | | |
|---|---|---|---|---|---|---|
| 2574.3411 | 2574.3052 | −0.0359 | −14 | 102 | 125 | TLNQPDSQLQL |
| | | | | | | TIFLSEGLK |

[0823] Along with these three newly discovered proteins for all the products derived from fraction IV, we have found the following existing discovered proteins from AFCC® in which in which good KH healthy cells exist AFCC® protein and their sequence:
[0824] KH53
[0825] Chain E, The Isomorphous Structures Of Prethrombin2
[0826] coagulation factor II (thrombin), isoform CRA_b
[0827] Chain B, Crystal Structure Of Human Coagulation Factor Xa
[0828] Chain A, Crystal Structure Of Prethrombin-2FRAGMENT-2 Complex
[0829] inter-alpha (globulin) inhibitor H2

### FIG. 13F

| Gel Idx/Pos | | 108/E7 | Instr./Gel Origin |
|---|---|---|---|
| Plate [#] Name | | [1] Sample Project | Instrument |
| | | 20120802 | Sample Name |
| Rank | Accession No. | Protein Name | |
| | gi\|194373497 | unnamed protein | |
| | | product | |
| | | [Homo sapiens] | |

KH53 (SEQ ID NO. KH 53)
Peptide Information
Project\Project
sample_20120802\P12139-
2fncbi

| | Obsrv. | | | Start | End | |
|---|---|---|---|---|---|---|
| Calc. Mass | Mass | ±da | ±ppm | Seq. | Seq. | Sequence |
| 836.4009 | 836.3804 | −0.0205 | −25 | 67 | 73 | GQQYQGR |
| 836.4009 | 836.3804 | −0.0205 | −25 | 67 | 73 | GQQYQGR |
| 1189.579 | 1189.5811 | 0.0021 | 2 | 449 | 457 | YGFYTHVFR |
| 1189.579 | 1189.5811 | 0.0021 | 2 | 449 | 457 | YGFYTHVFR |
| 1194.6001 | 1194.5938 | −0.0063 | −5 | 203 | 212 | ELLESYIDGR |
| 1464.7805 | 1464.7512 | −0.0293 | −20 | 336 | 349 | ETAASLLQAGYKGR |
| 1489.7223 | 1489.7413 | 0.019 | 13 | 446 | 457 | DGKYGFYTHVFR |
| 1489.7223 | 1489.7413 | 0.019 | 13 | 446 | 457 | DGKYGFYTHVFR |
| 1515.8352 | 1515.8251 | −0.0101 | −7 | 290 | 301 | ISMLEKIYIHPR |
| 1518.8275 | 1518.6852 | −0.1423 | −94 | 265 | 277 | NFTENDLLVRIGK |
| 1526.6251 | 1526.655 | 0.0299 | 20 | 410 | 424 | GDACEGDSGGPFVMK |
| 1542.62 | 1542.7037 | 0.0837 | 54 | 410 | 424 | GDACEGDSGGPFVMK |
| 1561.7281 | 1561.7467 | 0.0186 | 12 | 164 | 176 | TATSEYQTFFNPR |
| 1561.7281 | 1561.7467 | 0.0186 | 12 | 164 | 176 | TATSEYQTFFNPR |
| 1645.8214 | 1645.8168 | −0.0046 | −3 | 234 | 248 | SPQELLCGASLISDR |
| 1682.7262 | 1682.7006 | −0.0256 | −15 | 409 | 424 | RGDACEGDSGGPFVMK |
| 1860.9603 | 1860.9722 | 0.0119 | 6 | 350 | 366 | VTGWGNLKETWTANVGK |
| 1883.8956 | 1883.9106 | 0.015 | 8 | 177 | 193 | TFGSGEADCGLRPLFEK |
| 1883.8956 | 1883.9106 | 0.015 | 8 | 177 | 193 | TFGSGEADCGLRPLFEK |
| 1963.908 | 1963.8922 | −0.0158 | −8 | 97 | 112 | HQDFNSAVQLVENFCR |
| 1995.0481 | 1995.0499 | 0.0018 | 1 | 74 | 92 | LAVTTHGLPCLAWASAQ |
| | | | | | | AK |
| 1995.0481 | 1995.0499 | 0.0018 | 1 | 74 | 92 | LAVTTHGLPCLAWASAQ |
| | | | | | | AK |
| 2001.9158 | 2001.9205 | 0.0047 | 2 | 393 | 409 | ITDNMFCAGYKPDEGKR |
| 2011.9906 | 2012.0179 | 0.0273 | 14 | 177 | 194 | TFGSGEADCGLRPLFEKK |
| 2011.9906 | 2012.0179 | 0.0273 | 14 | 177 | 194 | TFGSGEADCGLRPLFEKK |
| 2017.9106 | 2018.0586 | 0.148 | 73 | 393 | 409 | ITDNMFCAGYKPDEGKR |
| 2232.2534 | 2232.2668 | 0.0134 | 6 | 367 | 386 | GQPSVLQVVNLPIVERPV |
| | | | | | | CK |
| 2232.2534 | 2232.2668 | 0.0134 | 6 | 367 | 386 | GQPSVLQVVNLPIVERPV |
| | | | | | | CK |
| 2281.0991 | 2281.1819 | 0.0828 | 36 | 213 | 232 | IVEGSDAEIGMSPWQVM |
| | | | | | | LFR |
| 2888.3591 | 2888.3918 | 0.0327 | 11 | 48 | 73 | SEGSSVNLSPPLEQCVP |
| | | | | | | DRGQQYQGR |
| 2888.3591 | 2888.3918 | 0.0327 | 11 | 48 | 73 | SEGSSVNLSPPLEQCVP |
| | | | | | | DRGQQYQGR |

| Gel Idx/Pos | | 109/E8 | Instr./Gel Origin |
|---|---|---|---|
| Plate [#] Name | | [1] Sample Project | Instrument |
| | | 20120802 | Sample Name |
| Rank | Accession No. | Protein Name | |
| | gi\|809450 | Chain E, The Isomorphous Structures Of Prethrombin2, | |
| | | Hirugen-And Ppack-Thrombin: Changes Accompanying | |
| | | Activation And Exosite Binding To | |
| | | Thrombin | |

[0831] Peptide Information

| Calc. | Obsrv. | | | Start | End | |
|---|---|---|---|---|---|---|
| Mass | Mass | ±da | ±ppm | Seq. | Seq. | Sequence |
| 874.4781 | 874.436 | −0.0421 | −48 | 174 | 181 | VTGWGNLK |
| 977.4897 | 977.473 | −0.0167 | −17 | 19 | 26 | SLEDKTER |
| 1189.579 | 1189.584 | 0.005 | 4 | 273 | 281 | YGFYTHVFR |
| 1189.579 | 1189.584 | 0.005 | 4 | 273 | 281 | YGFYTHVFR |
| 1194.6001 | 1194.6135 | 0.0134 | 11 | 27 | 36 | ELLESYIDGR |
| 1265.6022 | 1265.6649 | 0.0627 | 50 | 126 | 134 | YNWRENLDR |
| 1464.7805 | 1464.7592 | −0.0213 | −15 | 160 | 173 | ETAASLLQAGYKGR |
| 1489.7223 | 1489.7659 | 0.0436 | 29 | 270 | 281 | DGKYGFYTHVFR |
| 1489.7223 | 1489.7659 | 0.0436 | 29 | 270 | 281 | DGKYGFYTHVFR |
| 1515.8352 | 1515.8552 | 0.02 | 13 | 114 | 125 | ISMLEKIYIHPR |
| 1526.6251 | 1526.6322 | 0.0071 | 5 | 234 | 248 | GDACEGDSGGPFVMK |
| 1542.62 | 1542.5978 | −0.0222 | −14 | 234 | 248 | GDACEGDSGGPFVMK |
| 1682.7262 | 1682.7395 | 0.0133 | 8 | 233 | 248 | RGDACEGDSGGPFVMK |
| 1698.7211 | 1698.7263 | 0.0052 | 3 | 233 | 248 | RGDACEGDSGGPFVMK |
| 1859.7841 | 1859.9163 | 0.1322 | 71 | 255 | 269 | WYQMGIVSWGEGCDR |
| 1860.9603 | 1860.9381 | −0.0222 | −12 | 174 | 190 | VTGWGNLKETWTANVGK |
| 1860.9603 | 1860.9381 | −0.0222 | −12 | 174 | 190 | VTGWGNLKETWTANVGK |
| 1883.8956 | 1883.9144 | 0.0188 | 10 | 1 | 17 | TFGSGEADCGLRPLFEK |
| 1883.8956 | 1883.9144 | 0.0188 | 10 | 1 | 17 | TFGSGEADCGLRPLFEK |
| 2001.9158 | 2001.8892 | −0.0266 | −13 | 217 | 233 | ITDNMFCAGYKPDEGKR |
| 2001.9158 | 2001.8892 | −0.0266 | −13 | 217 | 233 | ITDNMFCAGYKPDEGKR |
| 2011.9906 | 2011.9617 | −0.0289 | −14 | 1 | 18 | TFGSGEADCGLRPLFEKK |
| 2011.9906 | 2011.9617 | −0.0289 | −14 | 1 | 18 | TFGSGEADCGLRPLFEKK |
| 2017.9106 | 2017.9246 | 0.014 | 7 | 217 | 233 | ITDNMFCAGYKPDEGKR |

[0832] Project\Project sample_{—}20120802T12139-2fncbi

| | | | | | | |
|---|---|---|---|---|---|---|
| 2114.9998 | 2114.981 | −0.0188 | −9 | 215 | 232 | IRITDNMFCAGYKPDEGK |
| 2232.2534 | 2232.2441 | −0.0093 | −4 | 191 | 210 | GQPSVLQVVNLPIVERPVCK |
| 2232.2534 | 2232.2441 | −0.0093 | −4 | 191 | 210 | GQPSVLQVVNLPIVERPVCK |
| 2255.2004 | 2255.1882 | −0.0122 | −5 | 141 | 159 | LKKPVAFSDYIHPVCLPDR |
| 2265.1042 | 2265.0938 | −0.0104 | −5 | 37 | 56 | IVEGSDAEIGMSPWQVMLFR |
| 2281.0991 | 2281.1055 | 0.0064 | 3 | 37 | 56 | IVEGSDAEIGMSPWQVMLFR |
| 2297.0942 | 2297.1052 | 0.011 | 5 | 37 | 56 | IVEGSDAEIGMSPWQVMLFR |
| 2691.4612 | 2691.4736 | 0.0124 | 5 | 191 | 214 | GQPSVLQVVNLPIVERPVCKDSTR |

| | | | |
|---|---|---|---|
| Gel Idx/Pos | | 110/E9 | Instr./Gel Origin |
| Plate [#] Name | | [1] Sample Project | Instrument |
| | | 20120802 | Sample Name |
| Rank | Accession No. | Protein Name | |

| | |
|---|---|
| gi\|119588384 | coagulation factor II |
| | (thrombin), isoform |
| | CRA_b |
| | [Homo sapiens] |

[0833] Peptide Information

| | | | | | | |
|---|---|---|---|---|---|---|
| Calc. Mass | Obsrv. | ±da | ±ppm | Start | End | Sequence |
| | Mass | | | Seq. | Seq. | |
| Calc. Mass | Obsrv. | ±da | ±ppm | | | Sequence |
| | Mass | | | | | |

[0834] Project\Project sample_{—}20120802\P12139-2fncbi

| | | | | | | |
|---|---|---|---|---|---|---|
| 971.425 | 971.3926 | −0.0324 | −33 | 87 | 94 | YTACETAR |
| 971.425 | 971.3926 | −0.0324 | −33 | 87 | 94 | YTACETAR |
| 1148.5518 | 1148.5323 | −0.0195 | −17 | 125 | 133 | SGIECQLWR |
| 1148.5518 | 1148.5323 | −0.0195 | −17 | 125 | 133 | SGIECQLWR |
| 1172.5074 | 1172.4919 | −0.0155 | −13 | 544 | 553 | ITDNMFCAGK |
| 1194.6001 | 1194.5298 | −0.0703 | −59 | 354 | 363 | ELLESYIDGR |
| 1220.6271 | 1220.5682 | −0.0589 | −48 | 416 | 425 | NFTENDLLVR |
| 1968.8903 | 1968.8732 | −0.0171 | −9 | 100 | 117 | LAACLEGNCAEGLGTNYR |
| 2154.9397 | 2154.9436 | 0.0039 | 2 | 159 | 177 | NPDSSTTGPWCYTTDPTVR |
| 2212.0122 | 2212.0112 | −0.001 | 0 | 98 | 117 | DKLAACLEGNCAEGLGTNYR |
| 2212.0122 | 2212.0112 | −0.001 | 0 | 98 | 117 | DKLAACLEGNCAEGLGTNYR |
| 2276.0469 | 2276.0325 | −0.0144 | −6 | 179 | 198 | QECSIPVCGQDQVTVAMTPR |
| 2292.0417 | 2292.0347 | −0.007 | −3 | 179 | 198 | QECSIPVCGQDQVTVAMTPR |
| 2432.1479 | 2432.1167 | −0.0312 | −13 | 178 | 198 | RQECSIPVCGQDQVTVAMTPR |
| 2432.1479 | 2432.1167 | −0.0312 | −13 | 178 | 198 | RQECSIPVCGQDQVTVAMTPR |
| 2448.1428 | 2448.137 | −0.0058 | −2 | 178 | 198 | RQECSIPVCGQDQVTVAMTPR |
| 2448.1428 | 2448.137 | −0.0058 | −2 | 178 | 198 | RQECSIPVCGQDQVTVAMTPR |

| Gel Idx/Pos | | 111/E10 | Instr./Gel Origin |
|---|---|---|---|
| Plate [#] | | [1] Sample Project | Instrument |
| Name | | 20120802 | Sample Name |
| Rank | Accession No. | Protein Name | |
| | gi\|10835687 | Chain B, Crystal | |
| | | Structure Of Human | |
| | | Coagulation | |
| | | Factor Xa Cornplexed | |
| | | With Rpr128515 | |

[0835] Peptide Information

| | Obsrv. | | | Start | End | |
|---|---|---|---|---|---|---|
| Calc. Mass | Mass | ±da | ±ppm | Seq. | Seq. | Sequence |
| 938.4366 | 938.3956 | −0.041 | −44 | 32 | 38 | TNEFWNK |
| 939.4352 | 939.3825 | −0.0527 | −56 | 75 | 81 | NCELFTR |
| 939.4352 | 939.3825 | −0.0527 | −56 | 75 | 81 | NCELFTR |
| 968.4207 | 968.4991 | 0.0784 | 81 | 24 | 31 | EVFEDSDK |
| 1067.5303 | 1067.4808 | −0.0495 | −46 | 75 | 82 | NCELFTRK |
| 1067.5303 | 1067.4808 | −0.0495 | −46 | 75 | 82 | NCELFTRK |
| 1320.6075 | 1320.5415 | −0.066 | −50 | 118 | 129 | ACIPTGPYPCGK |
| 1320.6075 | 1320.5415 | −0.066 | −50 | 118 | 129 | ACIPTGPYPCGK |
| 1723.6647 | 1723.5886 | −0.0761 | −44 | 41 | 55 | DGDQCETSPCQNQGK |
| 1723.6647 | 1723.5886 | −0.0761 | −44 | 41 | 55 | DGDQCETSPCQNQGK |
| 2014.823 | 2014.7344 | −0.0886 | −44 | 39 | 55 | YKDGDQCETSPCQNQGK |
| 2014.823 | 2014.7344 | −0.0886 | −44 | 39 | 55 | YKDGDQCETSPCQNQGK |
| 2223.9355 | 2223.8198 | −0.1157 | −52 | 56 | 74 | CKDGLGEYTCTCLEGFE |
| | | | | | | GK |
| 2240.0476 | 2239.9363 | −0.1113 | −50 | 109 | 129 | GYTLADNGKACIPTGPYP |
| | | | | | | CGK |
| 2240.0476 | 2239.9363 | −0.1113 | −50 | 109 | 129 | GYTLADNGKACIPTGPYP |
| | | | | | | CGK |

| Gel Idx/Pos | | 112/E11 | Instr./Gel Origin |
|---|---|---|---|
| Plate [#] Name | | [1] Sample Project | Instrument |
| | | 20120802 | Sample Name |
| Rank | Accession No. | Protein Name | |
| | gi\|307776408 | Chain A, Crystal | |
| | | Structure Of | |
| | | Prethombin- | |
| | | 2FRAGMENT-2 | |
| | | Complex | |

[0836] Peptide Information

| | Obsrv. | | | Start | End | |
|---|---|---|---|---|---|---|
| Calc. Mass | Mass | ±da | ±ppm | Seq. | Seq. | Sequence |
| 836.4009 | 836.3383 | −0.0626 | −75 | 20 | 26 | GQQYQGR |
| 836.4009 | 836.3383 | −0.0626 | −75 | 20 | 26 | GQQYQGR |
| 1963.908 | 1963.8728 | −0.0352 | −18 | 50 | 65 | HQDFNSAVQLVENFCR |
| 1995.0481 | 1994.9705 | −0.0776 | −39 | 27 | 45 | LAVTTHGLPCLAWASAQ |
| | | | | | | AK |
| 1995.0481 | 1994.9705 | −0.0776 | −39 | 27 | 45 | LAVTTHGLPCLAWASAQ |
| | | | | | | AK |
| 2070.9761 | 2070.8914 | −0.0847 | −41 | 1 | 19 | SEGSSVNLSPPLEQCVP |
| | | | | | | DR |
| 2888.3591 | 2888.2969 | −0.0622 | −22 | 1 | 26 | SEGSSVNLSPPLEQCVP |
| | | | | | | DRGQQYQGR |
| 2888.3591 | 2888.2969 | −0.0622 | −22 | 1 | 26 | SEGSSVNLSPPLEQCVP |
| | | | | | | DRGQQYQGR |

| Gel Idx/Pos | | 113/E12 | Instr./Gel Origin |
|---|---|---|---|
| Plate [#] | | [1] Sample Project | Instrument |
| Name | | 20120802 | Sample Name |
| Rank | Accession No. | Protein Name | |
| | gi\|55958061 | inter-alpha (globulin) | |
| | | inhibitor H2 | |
| | | [Homo sapiens] | |

[0837] Peptide Information

| Calc. | Obsrv. | | | Start | End | |
|---|---|---|---|---|---|---|
| Mass | Mass | ±da | ±ppm | Seq. | Seq | Sequence |
| 846.4832 | 846.4487 | −0.0345 | −41 | 173 | 179 | IYLQPGR |
| 891.4894 | 891.4301 | −0.0593 | −67 | 52 | 59 | VQSTITSR |

[0838] Project\Project sample_{—}20120802\P12139-2fncbi

| | | | | | | |
|---|---|---|---|---|---|---|
| 891.4894 | 891.4301 | −0.0593 | −67 | 52 | 59 | QSTITSR |
| 1010.5009 | 1010.4343 | −0.0666 | −66 | 60 | 68 | MATTMIQSK |
| 1010.5009 | 1010.4343 | −0.0666 | −66 | 60 | 68 | MATTMIQSK |
| 1026.4958 | 1026.4567 | −0.0391 | −38 | 60 | 68 | MATTMIQSK |
| 1042.4907 | 1042.4937 | 0.003 | 3 | 60 | 68 | MATTMIQSK |
| 1158.6993 | 1158.6176 | −0.0817 | −71 | 173 | 182 | IYLQPGRLAK |
| 2122.1292 | 2122.0242 | −0.105 | −49 | 69 | 87 | VVNNSPQPQNVVFDVQIPK |
| 2122.1292 | 2122.0242 | −0.105 | −49 | 69 | 87 | VVNNSPQPQNVVFDVQIPK |
| 2178.0859 | 2177.9634 | −0.1225 | −56 | 132 | 151 | SSALDMENFRTEVNVLPGAK |

[0839] In addition to these a lot more new found KH proteins and existing proteins whose cells are good healthy KH cells are being discovered from two series (32) process from the manufacturing of AFOD® from fraction IV and AFCC® from fraction III (under different patent application).

The application's sequence listing, which the Patent Office published only in electronic form, follows.

SEQUENCE LISTING (52 sequences)

SEQ ID NO: 1 - protein, 999 aa, Homo Sapiens
  misc_feature (966)..(966): Xaa can be any naturally occurring amino acid
  misc_feature (972)..(972): Xaa can be any naturally occurring amino acid
IMTQQGKIMTQQGKLQVFDARSFWQQRLMGQAMAKLMGQAMAKVELLEERVELLEERDTDEVFSSSSGDGPDLRSSGDGPDLRMNLDMRKDYCDNSRGTNGTPTKRLMGQAMAKRANNSLISNDRANNSLISNDRMERLEEVNKATILYATETGKAMHWVRNYADSVRGRFTFSRALDCSLGRNYADSVRGRWYSMKKWYSMKKNWIQYKMLEEIMKKNWIQYKVGPEADKYRKMLEEIMKTSTADYAMFKDNCCILDERWYSMKKWYSMKKNWIQYKMLEEIMKKNWIQYKVGPEADKYRKMLEEIMKTSTADYAMFKDNCCILDERWYSMKKWYSMKKNWIQYKMLEEIMKKNWIQYKVGPEADKYRKMLEEIMKTSTADYAMFKDNCCILDERWYSMKKWYSMKKNWIQYKMLEEIMKKNWIQYKVGPEADKYRKMLEEIMKTSTADYAMFKDNCCILDERWYSMKKWYSMKKNWIQYKMLEEIMKKNWIQYKVGPEADKYRKMLEEIMKTSTADYAMFKDNCCILDERWYSMKKWYSMKKNWIQYKMLEEIMKKNWIQYKVGPEADKYRKMLEEIMKTSTADYAMFKIMTQQGKIMTQQGKLQVFDARSFWQQRLMGQAMAKLMGQAMAKVELLEERVELLEERDTDEVFSSSSGDGPDLRSSGDGPDLRMNLDMRKDYCDNSRGTNGTPTKRLMGQAMAKRANNSLISNDRANNSLISNDRMERLEEVNKATILYATETGKWYSMKKWYSMKKNWIQYKMLEEIMKKNWIQYKVGPEADKYRKMLEEIMKTSTADYAMFKDNCCILDERSDCAQDKIWFQNREFHYNREFHYNRKSDCAQDKKSDCAQDKIWFQNRRYQTLELEKWYSMKKWYSMKKNWIQYKMLEEIMKKNWIQYKVGPEADKYRKMLEEIMKTSTADYAMFKTATDDTGGKRSSHLSRRSHSVTRMPASAPPRIPGSPXESMGRXREVSVSEGRIPTMRVTNRMMEASLYDK

SEQ ID NO: 2 - protein, 2001 aa, Homo Sapien
  misc_feature (1986)..(1986): Xaa can be any naturally occurring amino acid
SLVGLGGTKGEHALKDARAQEREQIKAQYEEIAQRGFSSGSAVVSGGSRMSCQISCKSRHGGGGGGFGGGGFGSRHGGGGGGFGGGGFGSRGSSSGGGYSSGSSSYGSGGRGGSGGGGSISGGGYGSGGGSGGRDVDNAYMIKVELQSKSISISVAGGGGGFGAAGGFGGRSLVGLGGTKGEHALKDARAQEREQIKAQYEEIAQRGFSSGSAVVSGGSRMSCQISCKSRHGGGGGGFGGGGFGSRHGGGGGGFGGGGFGSRGSSSGGGYSSGSSSYGSGGRGGSGGGGSISGGGYGSGGGSGGRDVDNAYMIKVELQSKSISISVAGGGGGFGAAGGFGGRLAEYHAKAKPALEDLRDEPPQSPWDRDEPPQSPWDRTHLAPYSDELRTHLAPYSDELRLAEYHAKAKPALEDLRDEPPQSPWDRDEPPQSPWDRTHLAPYSDELRTHLAPYSDELRLAEYHAKAKPALEDLRDEPPQSPWDRDEPPQSPWDRTHLAPYSDELRTHLAPYSDELRDLLIGAAKAEWLRKKVESESKNSDLGSSKILTGPVVRGRPPSSKKEIEDLLRDRVMINRTDYHILRGIILEEMKGIILEEMKAVLQSMSGRMSSVKRPRCHRIGQNKDYKNGNQLRANRIISEAIAKADPALCFLERTLIKSEPVSPKKAEIDIEAISGRKAEIDIEAISGRNCILADEMGLGKNCILADEMGLGKKCCNHPYLIKKCCNHPYLIKRGAYGAIMEEEDEGSKEEHDQSTQMSKEGGLKEEHDQSTQMSKEGGLKYNTIRADPALCFLEREEPQSSEEESMSSVETRTLIKKWLEEKMNLKPHRHQSVAFTKSHSIFTIKSHSIFTIKRIISETSKVFGPATTQKEEKAELNKEEDYADLKRISSADPDKEKIIEDMRLLDLIEDLKKEKETLIQQLKEILEENAERRLICNETVEVPKLICNETVEVPKIETQIMDIKPKILQIEDSEMSRILQIEDSEMSRIETQIMDIKPKRIMKLSNEIETATRIMKLSNEIETATRSNEMEEDLVKCENKGQSRLIFTYGLTNSGKTYTFQGTEENIGILPRLAEYHAKDEPPQSPWDRDEPPQSPWDRTHLAPYSDELRTHLAPYSDELRDLLIGAAKAEWLRKNSDLGSSKILTGPVVRRPKSGIAKEIEDLLRDRVMINRTDYHILRGIILEEMKGIILEEMKAVLQSMSGRCHRIGQNKADPALCFLERTLIKSEPVSPKKAEIDIEAISGRKAEIDIEAISGRKCCNHPYLIKKCCNHPYLIKLQVILKPMMLRRGAYGAIMEEEDEGSKEEHDQSTQMSKEGGLKEEHDQSTQMSKEGGLKYNTIRADPALCFLEREEPQSSEEESMSSVETRTLIKMLMAAGDKDLSAKETKVFHMLDKKVFHMLDKETKMLMAAGDKETKMLMAAGDKMTDLLNAEDIKDGDGKIGVDDPADVDVRNAANRTWWRVREDELSLVKEDELSLVKDTLGLGKTRTEEVIVIAKGASLSNGQGSRHQAQCALNERHQAQCALNERVNERLWLLDDSKVQLVDNVYCIGQRRWDYTAQQDQELDIKLEALKENGGATHLAPYSDELRTHLAPYSDELRRHGESSKTWKQLRTWKELRNSETVPEKGCLQEDVQRGCPGGDVETAQRELRNSETVPEKELRNSETVPEKGCLQEDVQRVQRLAEYHAKTHLAPYSDELRTHLAPYSDELRDLGLHPRARGLDLSRSVGEDKIRGLGSQTESLKARTCVVVAEERPRDTFCSYSVMELCTKYIEVYKDCIRLRFVSEEHRRYIELFRAFMAAQKCHKFSDPERVNYKSTAAEVQQVLNRMELIDDNTVVRMELIDDNTVVRTEYLNFEKSSSVSRMLMAAGDKDLSAKETKVFHMLDKKVFHMLDKETKMLMAAGDKETKMLMAAGDKDGDGKIGVDEFSTLVAESLQGEVEKYQQLQKSMSGRQKMAELIQKMAELIQKKQELGEARATVGKXIDLIIPRRVPHFSPR

SEQ ID NO: 3 - protein, 643 aa, Homo Sapien
GTEYLMKGTEYLMKGTEYLMKGAQKTGGGWRGTEYLMKQKGEELLLGVHLRMSFDTAKNFSAGGHKYMLDCRYMLDCRMSFDTAKSKMSFDTAKSKCPKCDKCERCGKMASKCPKMASKCPKTVYFAEKTVYFAEKFCLKCEREEELQCCSFQQRTKEEELQCCPKCDKCERCGKMASKCPKMASKCPKTVYFAEKTVYFAEKFCLKCERCPKCDKMASKCPKMASKCPKTVYFAEKTVYFAEKFCLKCERWNGMERVECNGMKVECNGMKWSGMERNWSGMERNEEFIERNMALHLKNMALHLKIQGLDFDTKEPWNMKEPWNMKNVMLENYREKEPWNMKADREEGKMSDETGRGHDKSDRSDRGHDKGYDKADREEAFPQKEEAFPQKGYDKVDRCPKCDKTVYFAEKTVYFAEKFCLKCERDPPDGSGRHLPDYRSYSESEKSYSESEKEPWNMKEPWNMKNVMLENYREKEPWNMKGSFYTDKGSFYTDKLTDPPDGSGRHLPDYRSYSESEKSYSESEKMMTATQRMMMTATQRMMTATQRARDRETQRNQGGYDRGGGFGAHGRYSGGNYRSKVADCRVADCRGHLSYYADSVKSYGIHWVRFTVSRDNSKMPAAALPRMPAAALPRAGQKGYHHR

SEQ ID NO: 4 - protein, 1627 aa, Homo Sapien
AAAVGTANKALIQCAKALASIDSKQCTDKRGALAEARKNLGPGMTKEAEAASIKAASDELSKAAVHLEGKVGELCAGKDTEAMKRDTEAMKRREILGTCKIFVTTKNSKELLPVLISAMKELLPVLISAMKVMLVNSMNTVKIPTISTQLKILSTVKWDRFGRKYVMGHFRYVMGHFRWDRNSSSSGSSGSSGAGQKRLEEEQREEENRKKSGYNNKKSGYNNKNENLAKKQKEEEREYEEKKAFVAYQKCSEELVKEDNESDAKMNDELYKDDDDAKLKTELGNSDLKAEIEAELDKQEQDKMNDELYKGFKIQSKSFRSPSKSPSKLERCSICQRCSICQRMFPSQSKRSYNYKVVALDSVMMAENNLKHFETPSKHQLTHFKHKQIHTRWALHPCSKWALHPCSKCSICQRHFKMHLGPPRMHLGPPRMHLGPPRAQNQPYKAQNQPYKCGEAGQSRCGEAGQSRGTQPHRDAVDLMKMVAVLGGRLAEDFLQYPSYIHKLHLMPEGKGYGHSRPPDRMVAVLGGRGVLRIEDMKRELTEEVKSKIEDMKSKIEDMKLFSFEISRLFSFEISRKGDQEEPSKAIDILDRQSDVRIKNQDDLDKYEDVEHKMQSDVRIKADPRASGKVAPTSAEKVNPESSGKTESPSLGKTYTVSPRTYTVSPRVDLVLSGKAEPEILGKMDFKSSKMDFKSSKADPMFTGKEHPVSSEKEDPISAGSRKETPQASEKGDPVAPGRMDPMTVRAAAVGTANKALIQCAKALASIDSKQCTDKRGALAEARKNLGPGMTKAASDELSKAAVHLEGKVGELCAGKDTEAMKRDTEAMKRREILGTCKIFVTTKNSKELLPVLISAMKELLPVLISAMKVMLVNSMNTVKIPTISTQLKILSTVKLREEGGRARSFCGEESGTEASRTTFVGLRPQPGGRGRVTKMDSKVERSDSKVTKMDSKVPSDKERAEAGSRSRLADHFSRFGLGTPEKFGLGTPEKSSPQAGRRSSPQAGRRQDLIHASTEKYGVQVMGSGLLAEMKSERPPTILMTEEPSSPKSERPPTILMTEEPSSPKSMGHSNRAIDILDRQSDVRIKNQDDLDKYEDVEHKVLYGTVRGSGGGRGASDRAEDLNIAPRAEDLNIAPRIARQACLTFRQACLTFRGSGGGRSGTSIPLHDHPGMHGMLKSGTSIPLHDHPGMHGMLKSGGLGLRRFHSPKIKRSPEMSGKSHLSSFTMKEVVSALRYFKEVVSALRYFKWSDQVMLEGVNSSHLSSFTMKLMDKAAAVGTANKALIQCAKALASIDSKQCTDKRGALAEARKNLGPGMTKEAEAASIKAASDELSKAAVHLEGKVGELCAGKDTEAMKRDTEAMKRREILGTCKIFVTTKNSKELLPVLISAMKELLPVLISAMKVMLVNSMNTVKIPTISTQLKILSTVKWVVSYFYFLGAGGKAEFVCERGGRDEERSSDGRPDSAQSNGPEKFRPDMRFYFQDKEGRFVLKEGRFVLKRMQEFREALRQASDKSKEIEAKLSGEYEKEIEAKIKLFEELGKLPEMDIDLPEMDIDFVSEDDRKLPEMDIDAEGGAGWRDAVDLMKLAEDFLQMGKHPAGRYPSYIHKLHLMPEGKGYGHSRPPDR

SEQ ID NO: 5 - protein, 1378 aa, Homo Sapien
MNGRLAREDTGIQRLVQSARDKSHNKMNGRMEDTGIQRRTVPYIFRSDLGQKRERDLERMSLIPGPRHFAFDRKNKGVYESVKMSLIPGPRRLWLSLFLHAGLWLSLFLHAGWQDDTGPPMDKSDLGQKWQDDTGPPMDKSDLGQKLLQDRRLYKEVRKCGQTSKEEPPPSRNVGIREKLGRLPYKLDTDHLRLDTDHLRLLVSLPTKRCAGEHRAREEFSRRCHLEAKAESDVERKHEKQQCQAFGIMWVRHYSVVLPTVSHSGFLYKLPPGWEKCSHLLVKCSHLLVKGAQGMGLTRLPPGWEKRLGDPYHPEGGDLGAFSRGAQGMGLTRSFNRGECSFNRGECADYEKHKLLMYWASTRLLMYWASTRDIVMTQSPDSLAVSLGERDIVMTQSPDSLAVSLGERTVAAPSVFIFPPSDEQLKDFQPITKDFQPITKTFKPTNREDFQEAREAEEREIKEDFQEARKMDTDVVKSSPSPGKRMDTDVVKLRMDTDVVKIEDMRKAQADIYKADFQAERQKEQALRASCQESARGMQLEDLKSSVVGSERKARAASEQARMNRHLWKIVMETVPVLKAQADIYKIVMETVPVLKAQADIYKSEKPQTKRMANNARDINEAFKRMANNARRMANNARERNLNPKSDDESSQKSASMVGTHRLDDAIHVLRLSIPKFKVEKMIDPKGVALSNVVHKTRNIIFFGKHIFSEDTSDFSGMSETKHIFSEDTSDFSGMSETKMVICERFIFEKKNKSVELKFKAFSTRFKAFSTRTMDALLARATTSVEMRAGFLHHVKEDAEKFARMVICERSKMTMDALLARIEDMRKAQADIYKADFQAERASCQESARGMQLEDLKSSVVGSERKIVMETVPVLKAQADIYKIVMETVPVLKAQADIYKLQGGLTARGYVPPTGKSFAINFKCGLDRFKITHNPFGPGQFFDLSIRIEDMRKAQADIYKADFQAERQKEQALRASCQESARGMQLEDLKSSVVGSERKARAASEQARMNRHLWKIVMETVPVLKAQADIYKIVMETVPVLKAQADIYKAQADIYKADFQAERGMQLEDLKSSVVGSERKIVMETVPVLKAQADIYKIVMETVPVLKAQADIYKSEKPQTKRMANNARDINEAFKRMANNARRMANNARERNLNPKSDDESSQKSASMVGTHRLDDAIHVLRDFIEKRIHLCQRLGLREIRLGLREIRGVGAKLGLRLWARYASRMRFEVKAFLHVKRDLYLQEKTCSSMFSKIMYTVSFIIHIDGFRVERFEKEASQKPRFQKMFRFQKMFRFQKMFREQARGSSREWQMERHPSHVQLKMAMIELGFGRMAMIELGFGRVGMQIPRSPKGCVRKALVGLSKGWNILTNMCLVEIEK

SEQ ID NO: 6 - protein, 2436 aa, Homo Sapien
LHIMAGRSHKWDRGEVPPRYPRGGYTLVSGYPKQGHNSVFLIKDYFMPCPGRDYFMPCPGRNFPSPVDAAFRNFPSPVDAAFRFDPVRGEVPPRFDPVRGEVPPRYYCFQGNQFLRYYCFQGNQFLRDVRDYFMPCPGRDVRDYFMPCPGRWKNFPSPVDAAFRGECQAEGVLFFQGDRLLQDEFPGIPSPLDAAVECHREVGTPHGIILDSVDAAFICPGSSREVGTPHGIILDSVDAAFICPGSSRLHIMAGRSHKWDRGEVPPRYPRGGYTLVSGYPKQGHNSVFLIKDYFMPCPGRDYFMPCPGRNFPSPVDAAFRNFPSPVDAAFRFDPVRGEVPPRFDPVRGEVPPRYYCFQGNQFLRYYCFQGNQFLRDVRDYFMPCPGRDVRDYFMPCPGRWKNFPSPVDAAFRGECQAEGVLFFQGDRLLQDEFPGIPSPLDAAVECHREVGTPHGIILDSVDAAFICPGSSREVGTPHGIILDSVDAAFICPGSSRSHKWDRGEVPPRYPRQGHNSVFLIKDYFMPCPGRDYFMPCPGRNFPSPVDAAFRNFPSPVDAAFRFDPVRGEVPPRFDPVRGEVPPRYYCFQGNQFLRYYCFQGNQFLRDVRDYFMPCPGRDVRDYFMPCPGRWKNFPSPVDAAFRGECQAEGVLFFQGDRLLQDEFPGIPSPLDAAVECHRLHIMAGRSHKWDRGGYTLVSGYPKQGHNSVFLIKNFPSPVDAAFRNFPSPVDAAFRWKNFPSPVDAAFRLLQDEFPGIPSPLDAAVECHREVGTPHGIILDSVDAAFICPGSSREVGTPHGIILDSVDAAFICPGSSRLHIMAGRGGYTLVSGYPKEVGTPHGIILDSVDAAFICPGSSREVGTPHGIILDSVDAAFICPGSSRGGYTLVSGYPKEVGTPHGIILDSVDAAFICPGSSREVGTPHGIILDSVDAAFICPGSSRLHIMAGRGGYTLVSGYPKEVGTPHGIILDSVDAAFICPGSSREVGTPHGIILDSVDAAFICPGSSRSHKWDRQGHNSVFLIKNFPSPVDAAFRNFPSPVDAAFRLSQRFPKFQNALLVRALAVARLSQRALAVARLSQRKLVAASQAALGLDAHKSEVAHRHPDYSVVLLLRAVMDDFAAFVEKRHPDYSVVLLLRVPQVSTPTLVEVSRLKECCEKPLLEKKVPQVSTPTLVEVSRYICENQDSISSKLKYICENQDSISSKLKRPCFSALEVDETYVPKLSQRFPKYLYEIARFQNALLVRKLVAASQAALGLDAHKSEVAHRLVNEETFLKKLVNEETFLKKHPDYSVVLLLRAVMDDFAAFVEKRHPDYSVVLLLRVPQVSTPTLVEVSRLKECCEKPLLEKKVPQVSTPTLVEVSRYICENQDSISSKLKYICENQDSISSKLKRPCFSALEVDETYVPKLSQRFPKYLYEIARFQNALLVRKLVAASQAALGLHPDYSVVLLLRAVMDDFAAFVEKRHPDYSVVLLLRMADCCAKQEPERVPQVSTPTLVEVSRLKECCEKPLLEKKVPQVSTPTLVEVSRYICENQDSISSKLKYICENQDSISSKLKRPCFSALEVDETYVPKLSQRFPKFQNALLVRKLVAASQAALGLDAHKSEVAHRHPDYSVVLLLRAVMDDFAAFVEKRHPDYSVVLLLRVPQVSTPTLVEVSRLKECCEKPLLEKKVPQVSTPTLVEVSRYICENQDSISSKLKYICENQDSISSKLKRPCFSALEVDETYVPKYLYEIARFQNALLVRKLVAASQAALGLLVNEVTEFAKHPDYSVVLLLRAVMDDFAAFVEKRHPDYSVVLLLRAWAVAHLSQRFPKVPQVSTPTLVEVSRLKECCEKPLLEKKVPQVSTPTLVEVSRYICENQDSISSKLKYICENQDSISSKLKRPCFSALEVDETYVPKLSQRFPKYLYEIARFQNALLVRKLVAASQAALGLLVNEVTEFAKHPDYSVVLLLRAVMDDFAAFVEKRHPDYSVVLLLRVPQVSTPTLVEVSRLKECCEKPLLEKKVPQVSTPTLVEVSRYICENQDSISSKLKYICENQDSISSKLKRPCFSALEVDETYVPKLSQRFPKYLYEIARFQNALLVRKLVAASQAALGLLVNEVTEFAKHPDYSVVLLLRAVMDDFAAFVEKRHPDYSVVLLLRVPQVSTPTLVEVSRLKECCEKPLLEKKVPQVSTPTLVEVSRYICENQDSISSKLKYICENQDSISSKLKRPCFSALEVDETYVPKSLSQRFPKYLYEIARFQNALLVRKLVAASQAALGLLVNEVTEFAKHPDYSVVLLLRAVMDDFAAFVEKRHPDYSVVLLLRVPQVSTPTLVEVSRLKECCEKPLLEKKVPQVSTPTLVEVSRYICENQDSISSKLKYICENQDSISSKLKRPCFSALEVDETYVPKSSSSPTQLGNSRNMSESMAAAHRNFTENDLLVRNYSVPIGLDSR

SEQ ID NO: 7 - protein, 5974 aa, Homo Sapien
LHIMAGRSHKWDRGEVPPRYPRGGYTLVSGYPKQGHNSVFLIKDYFMPCPGRDYFMPCPGRNFPSPVDAAFRNFPSPVDAAFRFDPVRGEVPPRFDPVRGEVPPRYYCFQGNQFLRYYCFQGNQFLRDVRDYFMPCPGRDVRDYFMPCPGRDVRDYFMPCPGRGECQAEGVLFFQGDRLLQDEFPGIPSPLDAAVECHRLLQDEFPGIPSPLDAAVECHREVGTPHGIILDSVDAAFICPGSSREVGTPHGIILDSVDAAFICPGSSRLHIMAGRSHKWDRGEVPPRYPRGGYTLVSGYPKQGHNSVFLIKDYFMPCPGRDYFMPCPGRNFPSPVDAAFRNFPSPVDAAFRFDPVRGEVPPRFDPVRGEVPPRYYCFQGNQFLRYYCFQGNQFLRDVRDYFMPCPGRDVRDYFMPCPGRDVRDYFMPCPGRGECQAEGVLFFQGDRLLQDEFPGIPSPLDAAVECHRLLQDEFPGIPSPLDAAVECHREVGTPHGIILDSVDAAFICPGSSREVGTPHGIILDSVDAAFICPGSSRSHKWDRGEVPPRYPRQGHNSVFLIKDYFMPCPGRDYFMPCPGRNFPSPVDAAFRNFPSPVDAAFRFDPVRGEVPPRFDPVRGEVPPRYYCFQGNQFLRYYCFQGNQFLRDVRDYFMPCPGRDVRDYFMPCPGRDVRDYFMPCPGRGECQAEGVLFFQGDRLLQDEFPGIPSPLDAAVECHRLLQDEFPGIPSPLDAAVECHRLHIMAGRSHKWDRGGYTLVSGYPKQGHNSVFLIKNFPSPVDAAFRNFPSPVDAAFRLLQDEFPGIPSPLDAAVECHRLLQDEFPGIPSPLDAAVECHREVGTPHGIILDSVDAAFICPGSSREVGTPHGIILDSVDAAFICPGSSRLHIMAGRGGYTLVSGYPKEVGTPHGIILDSVDAAFICPGSSREVGTPHGIILDSVDAAFICPGSSRGGYTLVSGYPKEVGTPHGIILDSVDAAFICPGSSREVGTPHGIILDSVDAAFICPGSSRLHIMAGRGGYTLVSGYPKEVGTPHGIILDSVDAAFICPGSSREVGTPHGIILDSVDAAFICPGSSRSHKWDRQGHNSVFLIKNFPSPVDAAFRNFPSPVDAAFRMSAAQALKKYSCDRQVEEAERAREEAEREAIAELERESYSALMRTEYNLRLKWVNKHLIKMVEGYQGLRKESYSALMRGRLCFEGLRQRELEQLGRIEEEIRVVRGLVDKIMVDRLVASMEEARRCQRCISELKMGIVGPEFKDKVQMEELSKLKFLQEEAEKMKFLQEEAEKMKELVLLLLQWMRLQNVQIALDYLRAQLEPVASPAKKPKSQVMDEATALQLRDVFEKATVSAPFGKDVFEKATVSAPFGKYASGSSASLGGPESAVADTHDQLSEPSEVRESADPLGAWLQDARESADPLGAWLQDARELQQRMQEEVVRAAKGGELVYTDSEARLLDAQLSTGGIVDPSKEAQAVPATLPELEATKESADPLGAWLQDARRESADPLGAWLQDARRRDDGTGQLLLPLSDARQVAEEAARLSVAAQEAARAEVVETTQVYTEEETRDPYTEQTISLFQAMKKLTAEDLFEARIISLETYNLLRLTAEDLFEARIISLETYNLLRMSAAQALKKYSCDRQVEEAERAREEAEREAIAELERESYSALMRTEYNLRLKWVNKHLIKMVEGYQGLRKESYSALMRGRLCFEGLRQRELEQLGRIEEEIRVVRGLVDKIMVDRLVASMEEARRCQRCISELKMGIVGPEFKDKVQMEELSKLKFLQEEAEKMKFLQEEAEKMKELVLLLLQWMRLQNVQIALDYLRAQLEPVASPAKKPKSQVMDEATALQLRDVFEKATVSAPFGKDVFEKATVSAPFGKYASGSSASLGGPESAVADTHDQLSEPSEVRESADPLGAWLQDARESADPLGAWLQDARELQQRMQEEVVRAAKGGELVYTDSEARLLDAQLSTGGIVDPSKEAQAVPATLPELEATKESADPLGAWLQDARRESADPLGAWLQDARRRDDGTGQLLLPLSDARQVAEEAARLSVAAQEAARAEVVETTQVYTEEETRDPYTEQTISLFQAMKKLTAEDLFEARIISLETYNLLRLTAEDLFEARIISLETYNLLRMSAAQALKKYSCDRQVEEAERAREEAEREAIAELERESYSALMRTEYNLRLKWVNKHLIKMVEGYQGLRKESYSALMRGRLCFEGLRQRELEQLGRIEEEIRVVRGLVDKIMVDRLVASMEEARRCQRCISELKMGIVGPEFKDKVQMEELSKLKFLQEEAEKMKFLQEEAEKMKELVLLLLQWMRLQNVQIALDYLRAQLEPVASPAKKPKSQVMDEATALQLRDVFEKATVSAPFGKDVFEKATVSAPFGKYASGSSASLGGPESAVADTHDQLSEPSEVRESADPLGAWLQDARESADPLGAWLQDARELQQRMQEEVVRAAKGGELVYTDSEARLLDAQLSTGGIVDPSKEAQAVPATLPELEATKESADPLGAWLQDARRESADPLGAWLQDARRRDDGTGQLLLPLSDARQVAEEAARLSVAAQEAARAEVVETTQVYTEEETRDPYTEQTISLFQAMKKLTAEDLFEARIISLETYNLLRLTAEDLFEARIISLETYNLLRMSAAQALKKYSCDRQVEEAERAREEAEREAIAELERESYSALMRTEYNLRLKWVNKHLIKMVEGYQGLRKESYSALMRGRLCFEGLRQRELEQLGRIEEEIRVVRGLVDKIMVDRLVASMEEARRCQRCISELKMGIVGPEFKDKVQMEELSKLKFLQEEAEKMKFLQEEAEKMKELVLLLLQWMRLQNVQIALDYLRAQLEPVASPAKKPKSQVMDEATALQLRDVFEKATVSAPFGKDVFEKATVSAPFGKYASGSSASLGGPESAVADTHDQLSEPSEVRESADPLGAWLQDARESADPLGAWLQDARELQQRMQEEVVRAAKGGELVYTDSEARLLDAQLSTGGIVDPSKEAQAVPATLPELEATKESADPLGAWLQDARRESADPLGAWLQDARRRDDGTGQLLLPLSDARQVAEEAARLSVAAQEAARAEVVETTQVYTEEETRDPYTEQTISLFQAMKKLTAEDLFEARIISLETYNLLRLTAEDLFEARIISLETYNLLRMSAAQALKKYSCDRQVEEAERAREEAEREAIAELERESYSALMRTEYNLRLKWVNKHLIKMVEGYQGLRKESYSALMRGRLCFEGLRQRELEQLGRIEEEIRVVRGLVDKIMVDRLVASMEEARRCQRCISELKMGIVGPEFKDKVQMEELSKLKFLQEEAEKMKFLQEEAEKMKELVLLLLQWMRLQNVQIALDYLRAQLEPVASPAKKPKSQVMDEATALQLRDVFEKATVSAPFGKDVFEKATVSAPFGKYASGSSASLGGPESAVADTHDQLSEPSEVRESADPLGAWLQDARESADPLGAWLQDARELQQRMQEEVVRAAKGGELVYTDSEARLLDAQLSTGGIVDPSKEAQAVPATLPELEATKESADPLGAWLQDARRESADPLGAWLQDARRRDDGTGQLLLPLSDARQVAEEAARLSVAAQEAARAEVVETTQVYTEEETRDPYTEQTISLFQAMKKLTAEDLFEARIISLETYNLLRLTAEDLFEARIISLETYNLLRMSAAQALKKYSCDRQVEEAERAREEAEREAIAELERESYSALMRTEYNLRLKWVNKHLIKMVEGYQGLRKESYSALMRGRLCFEGLRQRELEQLGRIEEEIRVVRGLVDKIMVDRLVASMEEARRCQRCISELKMGIVGPEFKDKVQMEELSKLKFLQEEAEKMKFLQEEAEKMKELVLLLLQWMRLQNVQIALDYLRAQLEPVASPAKKPKSQVMDEATALQLRDVFEKATVSAPFGKDVFEKATVSAPFGKYASGSSASLGGPESAVADTHDQLSEPSEVRESADPLGAWLQDARESADPLGAWLQDARELQQRMQEEVVRAAKGGELVYTDSEARLLDAQLSTGGIVDPSKEAQAVPATLPELEATKESADPLGAWLQDARRESADPLGAWLQDARRRDDGTGQLLLPLSDARQVAEEAARLSVAAQEAARAEVVETTQVYTEEETRDPYTEQTISLFQAMKKLTAEDLFEARIISLETYNLLRLTAEDLFEARIISLETYNLLRMSAAQALKKYSCDRQVEEAERAREEAEREAIAELERESYSALMRTEYNLRLKWVNKHLIKMVEGYQGLRKESYSALMRGRLCFEGLRQRELEQLGRIEEEIRVVRGLVDKIMVDRLVASMEEARRQRCISELKMGIVGPEFKDKVQMEELSKLKFLQEEAEKMKFLQEEAEKMKELVLLLLQWMRLQNVQIALDYLRAQLEPVASPAKKPKSQVMDEATALQLRDVFEKATVSAPFGKDVFEKATVSAPFGKYASGSSASLGGPESAVADTHDQLSEPSEVRESADPLGAWLQDARESADPLGAWLQDARELQQRMQEEVVRAAKGGELVYTDSEARLLDAQLSTGGIVDPSKEAQAVPATLPELEATKESADPLGAWLQDARRESADPLGAWLQDARRRDDGTGQLLLPLSDARQVAEEAARLSVAAQEAARAEVVETTQVYTEEETRDPYTEQTISLFQAMKKLTAEDLFEARIISLETYNLLRLTAEDLFEARIISLETYNLLRMSAAQALKKYSCDRQVEEAERAREEAEREAIAELERESYSALMRTEYNLRLKWVNKHLIKMVEGYQGLRKESYSALMRGRLCFEGLRQRELEQLGRIEEEIRVVRGLVDKIMVDRLVASMEEARRCQRCISELKMGIVGPEFKDKVQMEELSKLKFLQEEAEKMKFLQEEAEKMKELVLLLLQWMRLQNVQIALDYLRAQLEPVASPAKKPKSQVMDEATALQLRDVFEKATVSAPFGKDVFEKATVSAPFGKYASGSSASLGGPESAVADTHDQLSEPSEVRESADPLGAWLQDARESADPLGAWLQDARELQQRMQEEVVRLAQGHTTVDELARRLLDAQLSTGGIVDPSKEAQAVPATLPELEATKESADPLGAWLQDARRESADPLGAWLQDARRRDDGTGQLLLPLSDARQVAEEAARLSVAAQEAARAEVVETTQVYTEEETRDPYTEQTISLFQAMKKLTAEDLFEARIISLETYNLLRLTAEDLFEARIISLETYNLLRMSAAQALKKYSCDRQVEEAERAREEAEREAIAELERESYSALMRTEYNLRLKMVAGMLMPRMVEGYQGLRKESYSALMRGRLCFEGLRQRELEQLGRIEEEIRVVRGLVDKIMVDRLVASMEEARRCQRCISELKMGIVGPEFKDKVQMEELSKLKFLQEEAEKMKFLQEEAEKMKELVLLLLQWMRLQNVQIALDYLRAQLEPVASPAKKPKSQVMDEATALQLRDVFEKATVSAPFGKDVFEKATVSAPFGKYASGSSASLGGPESAVADTHDQLSEPSEVRESADPLGAWLQDARESADPLGAWLQDARELQQRMQEEVVRAAKGGELVYTDSEARLLDAQLSTGGIVDPSKEAQAVPATLPELEATKESADPLGAWLQDARRESADPLGAWLQDARRRDDGTGQLLLPLSDARQVAEEAARLSVAAQEAARAEVVETTQVYTEEETRDPYTEQTISLFQAMKKLTAEDLFEARIISLETYNLLRLTAEDLFEARIISLETYNLLRLHRDDRDDREHAKINQPIEPLNRANHVQADFYRANHVQADFYRRINQPIEPLNRTGIISLYDCIFKEDDEEETTASTLREDDEEETTASTLRAQVRDTLKHTVNPNMKEDGILGPIIRSQHLDNFSNQIGKVSNTNTESWEKLHSQHLDNFSNQIGKHYKQIHTKGKAFSLSSDLRWYECDNSGKWYECDNSGKMAAGLSANESSRTHMISMHPIIRKFPMRPPFLVIDRTHMISMHPIIRKKTHMISMHPIIRSYQCNLCEKAYTNCFHLRSYQCNLCEKAYTNCFHLR

SEQ ID NO: 8 - protein, 4236 aa, Homo Sapien
LHIMAGRSHKWDRGEVPPRYPRRLWWLDLKGGYTLVSGYPKQGHNSVFLIKDYFMPCPGRDYFMPCPGRNFPSPVDAAFRNFPSPVDAAFRFDPVRGEVPPRGGYTLVSGYPKRYYCFQGNQFLRYYCFQGNQFLRDVRDYFMPCPGRDVRDYFMPCPGRDVRDYFMPCPGRWKNFPSPVDAAFRGECQAEGVLFFQGDRSGAQATWTELPWPHEKLLQDEFPGIPSPLDAAVECHRLLQDEFPGIPSPLDAAVECHREVGTPHGIILDSVDAAFICPGSSREVGTPHGIILDSVDAAFICPGSSRLHIMAGRSHKWDRGEVPPRYPRRLWWLDLKGGYTLVSGYPKQGHNSVFLIKDYFMPCPGRDYFMPCPGRNFPSPVDAAFRNFPSPVDAAFRFDPVRGEVPPRGGYTLVSGYPKRYYCFQGNQFLRYYCFQGNQFLRDVRDYFMPCPGRDVRDYFMPCPGRDVRDYFMPCPGRWKNFPSPVDAAFRGECQAEGVLFFQGDRSGAQATWTELPWPHEKLLQDEFPGIPSPLDAAVECHRLLQDEFPGIPSPLDAAVECHREVGTPHGIILDSVDAAFICPGSSREVGTPHGIILDSVDAAFICPGSSRSHKWDRGEVPPRYPRQGHNSVFLIKDYFMPCPGRDYFMPCPGRNFPSPVDAAFRNFPSPVDAAFRFDPVRGEVPPRYYCFQGNQFLRYYCFQGNQFLRDVRDYFMPCPGRDVRDYFMPCPGRDVRDYFMPCPGRWKNFPSPVDAAFRGECQAEGVLFFQGDRLLQDEFPGIPSPLDAAVECHRLLQDEFPGIPSPLDAAVECHRLHIMAGRSHKWDRRLWWLDLKGGYTLVSGYPKQGHNSVFLIKNFPSPVDAAFRNFPSPVDAAFRGGYTLVSGYPKRWKNFPSPVDAAFRSGAQATWTELPWPHEKLLQDEFPGIPSPLDAAVECHRLLQDEFPGIPSPLDAAVECHREVGTPHGIILDSVDAAFICPGSSREVGTPHGIILDSVDAAFICPGSSRLHIMAGRRLWWLDLKGGYTLVSGYPKGGYTLVSGYPKRSQQCLSDQGHGHRSGAQATWTELPWPHEKEVGTPHGIILDSVDAAFICPGSSREVGTPHGIILDSVDAAFICPGSSRLHIMAGRRLWWLDLKGGYTLVSGYPKGGYTLVSGYPKRSGAQATWTELPWPHEKEVGTPHGIILDSVDAAFICPGSSREVGTPHGIILDSVDAAFICPGSSRGGYTLVSGYPKGGYTLVSGYPKREVGTPHGIILDSVDAAFICPGSSREVGTPHGIILDSVDAAFICPGSSRSHKWDRQGHNSVFLIKNFPSPVDAAFRNFPSPVDAAFRRPAKDARLDEEVKKMLPPEQRAVAGQGELTRKLEEAQRGLAREQAPNMAEPREQAPNMAEPRTELMQERSARTELMQERSARASAGDTRQVEVLKMVAEAEATVLGQRQALQASQAERDTARMVAEAEATVLGQRREVEEQHEVNEQLQARMEQAPNMAEPRGPVDHGVQIRMEQAPNMAEPRGPVDHGVQIRSTPDLLRDQQEAAPPGSVDHMKDQQEAAPPGSVDHMKATIYGILRRPAKDARLDEEVKKMLPPEQRAVAGQGELTRKLEEAQRGLAREQAPNMAEPREQAPNMAEPRTELMQERSARTELMQERSARASAGDTRQVEVLKMVAEAEATVLGQRQALQASQAERDTARMVAEAEATVLGQRREVEEQHEVNEQLQARMEQAPNMAEPRGPVDHGVQIRMEQAPNMAEPRGPVDHGVQIRSTPDLLRDQQEAAPPGSVDHMKDQQEAAPPGSVDHMKATIYGILRSQQLQEKMKPLIIRQLEAINDKMKELATTYKMKELATTYKDLEHSNDALKAAQTGAAGVRLKLHENLEEMKLHENLEEMKKDQENELSSKEHQETIDKLRTAQIINTQDLEKQVTCENSPKSPKFEMDFIDEVEKIRELENSLHEAKVSHLNLVDLAGSERLQESHDEMKSVAKSEELHIITSEKDKSEELHIITSEKDKSATISKEWEQDLKLNENYEEVKSITKLHENLEEMKSVMKLSNMQKDLENSNAKEIVAKHLETEEELKELEVTNDIIAKLQAKELEVTNDIIAKLQAKEMTQFLEEWLNTRVSYMEIYNETITDLLCGTQKVSYMEIYNETITDLLCGTQKVSHLNLVDLAGSERAAQTGAAGVRDDLATTQSNYKSTDQEFQNFKDDLATTQSNYKSTDQEFQNFKFHLAPWSRKFLSTPRTLVKGPDRFHLAPWSRGPVGWAPALSGIPQQENAAGSSRKKGPVGWAPALSGIPQQENAAGSSRSQQLQEKMKPLIIRQLEAINDKMKELATTYKMKELATTYKLHESLEEIRDLEHSNDALKAAQTGAAGVRLKLHENLEEMKLHENLEEMKEHQETIDKLRTAQIINTQDLEKQVTCENSPKSPKFEMDFIDEVEKIRELENSLHEAKVSHLNLVDLAGSERLQESHDEMKSVAKSEELHIITSEKDKSEELHIITSEKDKSATISKEWEQDLKLNENYEEVKSITKLHENLEEMKSVMKLSNMQKDLENSNAKEIVAKHLETEEELKELEVTNDIIAKLQAKELEVTNDIIAKLQAKEMTQFLEEWLNTRVSYMEIYNETITDLLCGTQKVSYMEIYNETITDLLCGTQKVSHLNLVDLAGSERAAQTGAAGVRDDLATTQSNYKSTDQEFQNFKDDLATTQSNYKSTDQEFQNFKSQQLQEKMKPLIIRQLEAINDKMKELATTYKMKELATTYKLHESLEEIRDLEHSNDALKAAQTGAAGVRLKLHENLEEMKLHENLEEMKEHQETIDKLRTAQIINTQDLEKQVTCENSPKSPKFEMDFIDEVEKIRELENSLHEAKVSHLNLVDLAGSERLQESHDEMKSVAKSEELHIITSEKDKSEELHIITSEKDKSATISKEWEQDLKLNENYEEVKSITKLHENLEEMKSVMKLSNMQKDLENSNAKEIVAKHLETEEELKELEVTNDIIAKLQAKELEVTNDIIAKLQAKEMTQFLEEWLNTRVSYMEIYNETITDLLCGTQKVSYMEIYNETITDLLCGTQKVSHLNLVDLAGSERAAQTGAAGVRDDLATTQSNYKSTDQEFQNFKDDLATTQSNYKSTDQEFQNFKSQQLQEKMKPLIIRQLEAINDKMKELATTYKMKELATTYKLHESLEEIRDLEHSNDALKAAQTGAAGVRLKLHENLEEMKLHENLEEMKEHQETIDKLRTAQIINTQDLEKQVTCENSPKSPKFEMDFIDEVEKIRELENSLHEAKVSHLNLVDLAGSERLQESHDEMKSVAKSEELHIITSEKDKSEELHIITSEKDKSATISKEWEQDLKLNENYEEVKSITKLHENLEEMKSVMKLSNMQKDLENSNAKEIVAKHLETEEELKELEVTNDIIAKLQAKELEVTNDIIAKLQAKEMTQFLEEWLNTRVSYMEIYNETITDLLCGTQKVSYMEIYNETITDLLCGTQKVSHLNLVDLAGSERAAQTGAAGVRDDLATTQSNYKSTDQEFQNFKDDLATTQSNYKSTDQEFQNFKSIYEYQPGKSIYEYQPGKSEMSYIDGEKSEMSYIDGEKSEMSYIDGEKAQTLKELPLQKDMDLTKICTGKSKSEMSYIDGEKFGDLLNIDDTAKRAEPKSIYEYQPGKSSSERNDWEPPDKRPSSSASTKDSESPRYSFSEDTKSPLSVPRDLSLCQTELEADLEKMETLNKDLSLCQTELEADLEKMETLNKMSSECDGGSKAVMNGLAPGSNGQDKAPHAMDRLERTAPREWKLEREQLKTPSKICSLIWLPKNDVTVWTCPTVSRGISETSNSALHFCKEGTCLAVGTSEGEVQLWDVVTKEGTCLAVGTSEGEVQLWDVVTKSSGDINDSILQPEVKIHITGLRQIHTKGKAFSLSSDLRWYECDNSGKWYECDNSGKMAAGLSANESSRTHMISMHPIIRKTHMISMHPIIRKKTHMISMHPIIRSYQCNLCEKAYTNCFHLRSYQCNLCEKAYTNCFHLRLSRGQPRVAEQEERQATVAMMNRKDELEEENRYVGAVQMLKRALVAKEALVSQMRQLQNYLRSVMNKVIQMVPEFAASPKKNLLDGEMEHSAALRHRSDIDLSRNGSGKVAGAGLACGRKKPTENVLIFLINRKKPTENVLIFLINREACFPGIGGCAEFKRTSLGAEPIRPWDSRKLCCFTEVGWSQHIMDKEVPKLCCFTEVGWSQHIMDKEVPK

SEQ ID NO: 9 - protein, 2652 aa, Homo Sapien
LHIMAGRSHKWDRGEVPPRYPRGGYTLVSGYPKQGHNSVFLIKDYFMPCPGRDYFMPCPGRNFPSPVDAAFRNFPSPVDAAFRFDPVRGEVPPRGGYTLVSGYPKRYYCFQGNQFLRYYCFQGNQFLRDVRDYFMPCPGRDVRDYFMPCPGRDVRDYFMPCPGRWKNFPSPVDAAFRGECQAEGVLFFQGDRLLQDEFPGIPSPLDAAVECHRLLQDEFPGIPSPLDAAVECHREVGTPHGIILDSVDAAFICPGSSREVGTPHGIILDSVDAAFICPGSSRSLGPNSCSANGPGLYLIHGPNLYCYSDVEKLHIMAGRSHKWDRGEVPPRYPRGGYTLVSGYPKQGHNSVFLIKDYFMPCPGRDYFMPCPGRNFPSPVDAAFRNFPSPVDAAFRFDPVRGEVPPRGGYTLVSGYPKRYYCFQGNQFLRYYCFQGNQFLRDVRDYFMPCPGRDVRDYFMPCPGRDVRDYFMPCPGRWKNFPSPVDAAFRGECQAEGVLFFQGDRLLQDEFPGIPSPLDAAVECHRLLQDEFPGIPSPLDAAVECHREVGTPHGIILDSVDAAFICPGSSREVGTPHGIILDSVDAAFICPGSSRSLGPNSCSANGPGLYLIHGPNLYCYSDVEKSHKWDRGEVPPRYPRQGHNSVFLIKDYFMPCPGRDYFMPCPGRNFPSPVDAAFRNFPSPVDAAFRFDPVRGEVPPRYYCFQGNQFLRYYCFQGNQFLRDVRDYFMPCPGRDVRDYFMPCPGRDVRDYFMPCPGRWKNFPSPVDAAFRGECQAEGVLFFQGDRLLQDEFPGIPSPLDAAVECHRLLQDEFPGIPSPLDAAVECHRLHIMAGRSHKWDRGGYTLVSGYPKQGHNSVFLIKNFPSPVDAAFRNFPSPVDAAFRGGYTLVSGYPKRWKNFPSPVDAAFRLLQDEFPGIPSPLDAAVECHRLLQDEFPGIPSPLDAAVECHREVGTPHGIILDSVDAAFICPGSSREVGTPHGIILDSVDAAFICPGSSRSLGPNSCSANGPGLYLIHGPNLYCYSDVEKLHIMAGRGGYTLVSGYPKGGYTLVSGYPKREVGTPHGIILDSVDAAFICPGSSREVGTPHGIILDSVDAAFICPGSSRSLGPNSCSANGPGLYLIHGPNLYCYSDVEKLHIMAGRGGYTLVSGYPKGGYTLVSGYPKREVGTPHGIILDSVDAAFICPGSSREVGTPHGIILDSVDAAFICPGSSRSLGPNSCSANGPGLYLIHGPNLYCYSDVEKGGYTLVSGYPKGGYTLVSGYPKREVGTPHGIILDSVDAAFICPGSSREVGTPHGIILDSVDAAFICPGSSRSHKWDRQGHNSVFLIKNFPSPVDAAFRNFPSPVDAAFREASPRLRIEPRGGGRWVNKTGRMEERHAKCSTGCPRGMVKAGTAGPGDALYAMLMKRLLVPANGADPTETLMLFFDKRLLVPANGADPTETLMLFFDKNEIDVVRAGTAGPGDALYAMLMKAPPPARVHLGAFLAVTPNPGSAASGTEAAAATPSKQFLEYESPHIPYKFSTWEPTKHIHEHAKAKELELLKHNPKELELLKHNPKAFATIGVPARARKLPIVACFHLKSVAPSSPHAALVRPRIKCSGCHSYQESTKIKCSGCHSYQESTKDVLDSEGYLLFYHKITTYVSFPLELDMTPFMASSKITTYVSFPLELDMTPFMASSKHQDSVSKSESQTKKGHQKTDKITPGRERGSINAQLKHQDSMSKSKSLPETDERMVPASASGEGLRLVVEHQESLSKDIIKGPISAQLKHQDSMSKSEMQVKDMSVQRQEGIFTRIITHDEESGENPMLKLSAPGSQRNPQLNQQSTGESSSVSERSTGESSSVSERGSLKWEEAARNLLGLIEAKALGNQQPSWDSEDSSNFKDVGSKDGRCHRLLETRPKRDTLWWERGFIAPCPGSPLGSPSLRLPGPCSRGFIAPCPGSPLGSPSLRLPGPCSRGFIAPCPGSPLGSPSLRYFDLWGGLEWIGRDSSITMVRGVRDSSITMVRGVRIYTSGSTNYNPSLKVTMSVDTSKNQFSLKVTMSVDTSKNQFSLKLSAPGSQRNPQLNQQSTGESSSVSERSTGESSSVSERGSLKWEEAARNLLGLIEAKALGNQQPSWDSEDSSNFKDVGSKQIHTKGKAFSLSSDLRWYECDNSGKWYECDNSGKMAAGLSANESSRTHMISMHPIIRKKTHMISMHPIIRSYQCNLCEKAYTNCFHLRSYQCNLCEKAYTNCFHLREASPRLRIEPRGGGRWVNKTGRMEERHAKAGTAGPGDALYAMLMKRLLVPANGADPTETLMLFFDKRLLVPANGADPTETLMLFFDKNEIDVVRAGTAGPGDALYAMLMKAPPPARVHLGAFLAVTPNPGSAASGTEAAAATPSKEASPRLRIEPRGGGRWVNKTGRMEERHAKAGTAGPGDALYAMLMKRLLVPANGADPTETLMLFFDKRLLVPANGADPTETLMLFFDKNEIDVVRAGTAGPGDALYAMLMKAPPPARVHLGAFLAVTPNPGSAASGTEAAAATPSKDFIEKRLGLREIRGVGAKLGLRALENVLSGKYAFGQETNVPLNNFSADQVTRALENVLSGKDFIEKRLGLREIRGVGAKLGLRALENVLSGKYAFGQETNVPLNNFSADQVTRALENVLSGK

SEQ ID NO: 10 - protein, 643 aa, Homo Sapien
FSPENTRFSPENTRFSPENTRKSLNPNRVTFKFRIEDGFSLKANRPFLVFIRTSDQIHFFFAKTSDQIHFFFAKEVPLNTIIFMGREVPLNTIIFMGREVPLNTIIFMGRHGSPVDICTAKPRDIPMNPMCIYRDIPMNPMCIYRLQPLDFKENAEQSRLQPLDFKENAEQSRLPGIVAEGRDDLYVSDAFHKAFLEVNEEGSEAAASTAVVIAGRFSPENTRFSPENTRFSPENTRKSLNPNRVTFKFRIEDGFSLKYSNVIGTVTSGKANRPFLVFIRTSDQIHFFFAKTSDQIHFFFAKEVPLNTIIFMGREVPLNTIIFMGREVPLNTIIFMGRDIPMNPMCIYRDIPMNPMCIYRLQPLDFKENAEQSRLQPLDFKENAEQSRLPGIVAEGRDDLYVSDAFHKAFLEVNEEGSEAAASTAVVIAGRTSDQIHFFFAKEVPLNTIIFMGRLQPLDFKENAEQSRQEPSQGTTTFAVTSILRQEPSZGTTTFAVTSILRYSSSLESRIYTMAADKYIENMSRYLHRPSRMDEGIPHLQERSRCNTTQGNEVTSILRYIYAKDRYLSVQYREHIKVQQLMAKLYGLSTFKERVVTDEVHQNQILRQLRQEVVACMRKSMEWLRVSPSASFRQHVLQMREQR

SEQ ID NO: 11 - protein, 5924 aa, Homo Sapien
LAEYHAKQKVEPLRAELQEGARARAHVDALRAKPALEDLRAKPALEDLRDEPPQSPWDRDEPPQSPWDRVQPYLDDFQKWQEEMELYRTHLAPYSDELRTHLAPYSDELRETEGLCQEMSKLSPLGEEMRDRETEGLCQEMSKVQPYLDDFQKKVSFLSALEEYTKDYVSQFEGSALGKKWQEEMELYRDEPPQSPWDRVKVEPLRAELQEGARVEPLRAELQEGARTHLAPYSDELRQRTHLAPYSDELRQRLLDNWDSVTSTFSKDLATVYVDVLKDSGRDSGRDYVSQFEGSALGKDSGRDYVSQFEGSALGKLREQLGPVTQEFWDNLEKLAEYHAKQKVEPLRAELQEGARARAHVDALRAKPALEDLRAKPALEDLRDEPPQSPWDRDEPPQSPWDRVQPYLDDFQKWQEEMELYRTHLAPYSDELRTHLAPYSDELRLSPLGEEMRDRETEGLRQEMSKVQPYLDDFQKKVSFLSALEEYTKDYVSQFEGSALGKKWQEEMELYRDEPPQSPWDRVKVEPLRAELQEGARVEPLRAELQEGARTHLAPYSDELRQRTHLAPYSDELRQRLLDNWDSVTSTFSKDLATVYVDVLKDSGRDSGRDYVSQFEGSALGKDSGRDYVSQFEGSALGKLREQLGPVTQEFWDNLEKLAEYHAKQKVEPLRAELQEGARARAHVDALRAKPALEDLRAKPALEDLRDEPPQSPWDRDEPPQSPWDRVQPYLDDFQKWQEEMELYRTHLAPYSDELRTHLAPYSDELRLSPLGEEMRDRETEGLRQEMSKVQPYLDDFQKKVSFLSALEEYTKDYVSQFEGSALGKKWQEEMELYRDEPPQSPWDRVKVEPLRAELQEGARVEPLRAELQEGARTHLAPYSDELRQRTHLAPYSDELRQRLLDNWDSVTSTFSKDLATVYVDVLKDSGRDSGRDYVSQFEGSALGKDSGRDYVSQFEGSALGKLAEYHAKQKVEPLRAELQEGARAKPALEDLRAKPALEDLRDEPPQSPWDRDEPPQSPWDRVQPYLDDFQKDCARAHVDALRTHLAPYSDELRTHLAPYSDELRETEGLCQEMSKETEGLCQEMSKVQPYLDDFQKKVSFLSALEEYTKDYVSQFEGSALGKKWQEEMELYRDEPPQSPWDRVKVEPLRAELQEGARVEPLRAELQEGARTHLAPYSDELRQRTHLAPYSDELRQRLLDNWDSVTSTFSKDLATVYVDVLKDSGRDSGRDYVSQFEGSALGKDSGRDYVSQFEGSALGKLREQLGPVTQEFWDNLEKLAEYHAKQKVEPLRAELQEGARAKPALEDLRAKPALEDLRDEPPQSPWDRDEPPQSPWDRVQPYLDDFQKDCARAHVDALRTHLAPYSDELRTHLAPYSDELRETEGLRQEMSKVQPYLDDFQKKVSFLSALEEYTKDYVSQFEGSALGKKWQEEMELYRDEPPQSPWDRVKVEPLRAELQEGARVEPLRAELQEGARTHLAPYSDELRQRTHLAPYSDELRQRLLDNWDSVTSTFSKDLATVYVDVLKDSGRDSGRDYVSQFEGSALGKDSGRDYVSQFEGSALGKLREQLGPVTQEFWDNLEKLAEYHAKQKVEPLRAELQEGARAKPALEDLRAKPALEDLRDEPPQSPWDRDEPPQSPWDRVQPYLDDFQKDCARAHVDALRTHLAPYSDELRTHLAPYSDELRETEGLRQEMSKVQPYLDDFQKKVSFLSALEEYTKDYVSQFEGSALGKKWQEEMELYRDEPPQSPWDRVKVEPLRAELQEGARVEPLRAELQEGARTHLAPYSDELRQRTHLAPYSDELRQRLLDNWDSVTSTFSKDLATVYVDVLKDSGRDSGRDYVSQFEGSALGKDSGRDYVSQFEGSALGKLAEYHAKQKVEPLRAELQEGARARAHVDALRDEPPQSPWDRDEPPQSPWDRVQPYLDDFQKWQEEMELYRTHLAPYSDELRTHLAPYSDELRETEGLCQEMSKLSPLGEEMRDRETEGLCQEMSKVQPYLDDFQKKVSFLSALEEYTKDYVSQFEGSALGKKWQEEMELYRDEPPQSPWDRVKVEPLRAELQEGARVEPLRAELQEGARTHLAPYSDELRQRTHLAPYSDELRQRLLDNWDSVTSTFSKDLATVYVDVLKDSGRDSGRDYVSQFEGSALGKDSGRDYVSQFEGSALGKLREQLGPVTQEFWDNLEKLAEYHAKQKVEPLRAELQEGARARAHVDALRDEPPQSPWDRDEPPQSPWDRVQPYLDDFQKWQEEMELYRTHLAPYSDELRTHLAPYSDELRLSPLGEEMRDRETEGLRQEMSKVQPYLDDFQKKVSFLSALEEYTKDYVSQFEGSALGKKWQEEMELYRDEPPQSPWDRVKVEPLRAELQEGARVEPLRAELQEGARTHLAPYSDELRQRTHLAPYSDELRQRLLDNWDSVTSTFSKDLATVYVDVLKDSGRDSGRDYVSQFEGSALGKDSGRDYVSQFEGSALGKLREQLGPVTQEFWDNLEKLAEYHAKQKVEPLRAELQEGARARAHVDALRAKPALEDLRAKPALEDLRVQPYLDDFQKWQEEMELYRTHLAPYSDELRTHLAPYSDELRLSPLGEEMRDRETEGLRQEMSKVQPYLDDFQKKVSFLSALEEYTKDYVSQFEGSALGKKWQEEMELYRVEPLRAELQEGARVEPLRAELQEGARTHLAPYSDELRQRTHLAPYSDELRQRLLDNWDSVTSTFSKDLATVYVDVLKDSGRDSGRDYVSQFEGSALGKDSGRDYVSQFEGSALGKLREQLGPVTQEFWDNLEKLAEYHAKQKVEPLRAELQEGARARAHVDALRAKPALEDLRAKPALEDLRDEPPQSPWDRDEPPQSPWDRVQPYLDDFQKWQEEMELYRTHLAPYSDELRTHLAPYSDELRETEGLCQEMSKLSPLGEEMRDRETEGLCQEMSKVQPYLDDFQKKVSFLSALEEYTKDYVSQFEGSALGKKWQEEMELYRDEPPQSPWDRVKVEPLRAELQEGARVEPLRAELQEGARLLDNWDSVTSTFSKDLATVYVDVLKDSGRDSGRDYVSQFEGSALGKDSGRDYVSQFEGSALGKLREQLGPVTQEFWDNLEKLAEYHAKARAHVDALRAKPALEDLRAKPALEDLRDEPPQSPWDRDEPPQSPWDRVQPYLDDFQKWQEEMELYRTHLAPYSDELRTHLAPYSDELRLSPLGEEMRDRETEGLRQEMSKVQPYLDDFQKKVSFLSALEEYTKDYVSQFEGSALGKKWQEEMELYRDEPPQSPWDRVKTHLAPYSDELRQRTHLAPYSDELRQRLLDNWDSVTSTFSKDLATVYVDVLKDSGRDSGRDYVSQFEGSALGKDSGRDYVSQFEGSALGKLREQLGPVTQEFWDNLEKLAEYHAKQKVEPLRAELQEGARARAHVDALRAKPALEDLRAKPALEDLRVQPYLDDFQKWQEEMELYRTHLAPYSDELRTHLAPYSDELRLSPLGEEMRDRETEGLRQEMSKVQPYLDDFQKKVSFLSALEEYTKDYVSQFEGSALGKKWQEEMELYRVEPLRAELQEGARVEPLRAELQEGARTHLAPYSDELRQRTHLAPYSDELRQRLLDNWDSVTSTFSKDLATVYVDVLKDSGRDSGRDYVSQFEGSALGKDSGRDYVSQFEGSALGKLREQLGPVTQEFWDNLEKLAEYHAKQKVEPLRAELQEGARARAHVDALRAKPALEDLRAKPALEDLRDEPPQSPWDRDEPPQSPWDRVQPYLDDFQKWQEEMELYRTHLAPYSDELRTHLAPYSDELRLSPLGEEMRDRETEGLRQEMSKVQPYLDDFQKKVSFLSALEEYTKDYVSQFEGSALGKKWQEEMELYRDEPPQSPWDRVKVEPLRAELQEGARVEPLRAELQEGARLLDNWDSVTSTFSKDLATVYVDVLKDSGRDSGRDYVSQFEGSALGKDSGRDYVSQFEGSALGKLREQLGPVTQEFWDNLEKLAEYHAKQKVEPLRAELQEGARARAHVDALRDEPPQSPWDRDEPPQSPWDRVQPYLDDFQKWQEEMELYRTHLAPYSDELRTHLAPYSDELRLSPLGEEMRDRETEGLRQEMSKVQPYLDDFQKKVSFLSALEEYTKDYVSQFEGSALGKKWQEEMELYRDEPPQSPWDRVKVEPLRAELQEGARVEPLRAELQEGARTHLAPYSDELRQRTHLAPYSDELRQRLLDNWDSVTSTFSKDLATVYVDVLKDSGRDSGRDYVSQFEGSALGKDSGRDYVSQFEGSALGKLAEYHAKQKVEPLRAELQEGARARAHVDALRAKPALEDLRAKPALEDLRVQPYLDDFQKWQEEMELYRTHLAPYSDELRTHLAPYSDELRLSPLGEEMRDRETEGLRQEMSKVQPYLDDFQKKVSFLSALEEYTKDYVSQFEGSALGKKWQEEMELYRVEPLRAELQEGARVEPLRAELQEGARTHLAPYSDELRQRTHLAPYSDELRQRLLDNWDSVTSTFSKDLATVYVDVLKDSGRDSGRDYVSQFEGSALGKDSGRDYVSQFEGSALGKLREQLGPVTQEFWDNLEKLAEYHAKQKVEPLRAELQEGARARAHVDALRAKPALEDLRAKPALEDLRDEPPQSPWDRDEPPQSPWDRVQPYLDDFQKWQEEMELYRTHLAPYSDELRTHLAPYSDELRLSPLGEEMRDRETEGLRQEMSKVQPYLDDFQKKVSFLSALEEYTKDYVSQFEGSALGKKWQEEMELYRDEPPQSPWDRVKVEPLRAELQEGARVEPLRAELQEGARLLDNWDSVTSTFSKDLATVYVDVLKDSGRDSGRDYVSQFEGSALGKDSGRDYVSQFEGSALGKLAEYHAKQKVEPLRAELQEGARDEPPQSPWDRDEPPQSPWDRVQPYLDDFQKDCARAHVDALRTHLAPYSDELRTHLAPYSDELRETEGLRQEMSKVQPYLDDFQKKVSFLSALEEYTKDYVSQFEGSALGKKWQEEMELYRDEPPQSPWDRVKVEPLRAELQEGARVEPLRAELQEGARTHLAPYSDELRQRTHLAPYSDELRQRLLDNWDSVTSTFSKDLATVYVDVLKDSGRDSGRDYVSQFEGSALGKDSGRDYVSQFEGSALGKLREQLGPVTQEFWDNLEKLAEYHAKQKVEPLRAELQEGARAKPALEDLRAKPALEDLRDEPPQSPWDRDEPPQSPWDRVQPYLDDFQKDCARAHVDALRTHLAPYSDELRTHLAPYSDELRTEGLRQEMSKVQPYLDDFQKKVSFLSALEEYTKDYVSQFEGSALGKKWQEEMELYRDEPPQSPWDRVKVEPLRAELQEGAREPLRAELQEGARLLDNWDSVTSTFSKDLATVYVDVLKDSGRDSGRDYVSQFEGSALGKDSGRDYVSQFEGSALGKLREQLGPVTQEFWDNLEKLAEYHAKAELQEGARARAHVDALRAKPALEDLRAKPALEDLRVQPYLDDFQKWQEEMELYRTHLAPYSDELRTHLAPYSDELRLSPLGEEMRDRETEGLRQEMSKVQPYLDDFQKKVSFLSALEEYTKDYVSQFEGSALGKKWQEEMELYRVDPLRAELQEGARTHLAPYSDELRQRTHLAPYSDELRQRLLDNWDSVTSTFSKDLATVYVDVLKDSGRDSGRDYVSQFEGSALGKDSGRDYVSQFEGSALGKLREQLGPVTQEFWDNLEKLAEYHAKQKVEPLRAELQEGARARAHVDALRVQPYLDDFQKWQEEMELYRTHLAPYSDELRTHLAPYSDELRLSPLGEEMRDRETEGLRQEMSKVQPYLDDFQKKVSFLSALEEYTKDYVSQFEGSALGKKWQEEMELYRVEPLRAELQEGARVEPLRAELQEGARTHLAPYSDELRQRTHLAPYSDELRQRLLDNWDSVTSTFSKDLATVYVDVLKDSGRDSGRDYVSQFEGSALGKDSGRDYVSQFEGSALGKLREQLGPVTQEFWDNLE

SEQ ID NO: 12 - protein, 5874 aa, Homo Sapien
  misc_feature (5848)..(5848): Xaa can be any naturally occurring amino acid
GQQYQGRGQQYQGRVTGWGNLKYERNIEKYTACETARSGIECQLWRSGIECQLWRYGFYTHVFRELLESYIDGRELLESYIDGRYNWRENLDRDGKYGFYTHVFRGDACEGDSGGPFVMKTATSEYQTFFNPRTATSEYQTFFNPRSPQELLCGASLISDRRGDACEGDSGGPFVMKKSPQELLCGASLISDRTFGSGEADCGLRPLFEKTFGSGEADCGLRPLFEKHQDFNSAVQLVENFCRLAACLEGNCAEGLGTNYRITDNMFCAGYKPDEGKRTFGSGEADCGLRPLFEKKITDNMFCAGYKPDEGKRSEGSSVNLSPPLEQCVPDRNPDSSTMGPWCYTTDPTVRDKLAACLEGNCAEGLGTNYRDKLAACLEGNCAEGLGTNYRGQPSVLQVVNLPIVERPVCKGQPSVLQVVNLPIVERPVCKIVEGSDAEIGMSPWQVMLFRQECSIPVCGQDQVTVAMTPRRQECSIPVCGQDQVTVAMTPRSEGSSVNLSPPLEQCVPDRGQQYQGRSEGSSVNLSPPLEQCVPDRGQQYQGRSGQQYQGRGQQYQGRVTGWGNLKYERNIEKYTACETARSGIECQLWRSGIECQLWRYGFYTHVFRELLESYIDGRELLESYIDGRYNWRENLDRDGKYGFYTHVFRGDACEGDSGGPFVMKTATSEYQTFFNPRTATSEYQTFFNPRSPQELLCGASLISDRRGDACEGDSGGPFVMKKSPQELLCGASLISDRTFGSGEADCGLRPLFEKTFGSGEADCGLRPLFEKHQDFNSAVQLVENFCRLAACLEGNCAEGLGTNYRITDNMFCAGYKPDEGKRTFGSGEADCGLRPLFEKKITDNMFCAGYKPDEGKRSEGSSVNLSPPLEQCVPDRDKLAACLEGNCAEGLGTNYRDKLAACLEGNCAEGLGTNYRGQPSVLQVVNLPIVERPVCKGQPSVLQVVNLPIVERPVCKIVEGSDAEIGMSPWQVMLFRQECSIPVCGQDQVTVAMTPRRQECSIPVCGQDQVTVAMTPRSEGSSVNLSPPLEQCVPDRGQQYQGRSEGSSVNLSPPLEQCVPDRGQQYQGRGQQYQGRGQQYQGRVTGWGNLKYERNIEKYTACETARSGIECQLWRSGIECQLWRYGFYTHVFRELLESYIDGRELLESYIDGRYNWRENLDRDGKYGFYTHVFRGDACEGDSGGPFVMKTATSEYQTFFNPRTATSEYQTFFNPRSPQELLCGASLISDRRGDACEGDSGGPFVMKKSPQELLCGASLISDRTFGSGEADCGLRPLFEKTFGSGEADCGLRPLFEKHQDFNSAVQLVENFCRLAACLEGNCAEGLGTNYRITDNMFCAGYKPDEGKRTFGSGEADCGLRPLFEKKITDNMFCAGYKPDEGKRSEGSSVNLSPPLEQCVPDRDKLAACLEGNCAEGLGTNYRDKLAACLEGNCAEGLGTNYRGQPSVLQVVNLPIVERPVCKGQPSVLQVVNLPIVERPVCKIVEGSDAEIGMSPWQVMLFRQECSIPVCGQDQVTVAMTPRRQECSIPVCGQDQVTVAMTPRSEGSSVNLSPPLEQCVPDRGQQYQGRSEGSSVNLSPPLEQCVPDRGQQYQGRGQQYQGRGQQYQGRVTGWGNLKYERNIEKYTACETARSGIECQLWRSGIECQLWRYGFYTHVFRELLESYIDGRELLESYIDGRYNWRENLDRDGKYGFYTHVFRGDACEGDSGGPFVMKTATSEYQTFFNPRTATSEYQTFFNPRSPQELLCGASLISDRRGDACEGDSGGPFVMKKSPQELLCGASLISDRTFGSGEADCGLRPLFEKTFGSGEADCGLRPLFEKHQDFNSAVQLVENFCRLAACLEGNCAEGLGTNYRITDNMFCAGYKPDEGKRTFGSGEADCGLRPLFEKKITDNMFCAGYKPDEGKRSEGSSVNLSPPLEQCVPDRDKLAACLEGNCAEGLGTNYRDKLAACLEGNCAEGLGTNYRGQPSVLQVVNLPIVERPVCKGQPSVLQVVNLPIVERPVCKIVEGSDAEIGMSPWQVMLFRQECSIPVCGQDQVTVAMTPRRQECSIPVCGQDQVTVAMTPRSEGSSVNLSPPLEQCVPDRGQQYQGRSEGSSVNLSPPLEQCVPDRGQQYQGRGQQYQGRGQQYQGRVTGWGNLKYERNIEKYTACETARSGIECQLWRSGIECQLWRYGFYTHVFRELLESYIDGRELLESYIDGRYNWRENLDRDGKYGFYTHVFRGDACEGDSGGPFVMKTATSEYQTFFNPRTATSEYQTFFNPRSPQELLCGASLISDRRGDACEGDSGGPFVMKKSPQELLCGASLISDRHQDFNSAVQLVENFCRLAACLEGNCAEGLGTNYRITDNMFCAGYKPDEGKRITDNMFCAGYKPDEGKRSEGSSVNLSPPLEQCVPDRDKLAACLEGNCAEGLGTNYRDKLAACLEGNCAEGLGTNYRGQPSVLQVVNLPIVERPVCKGQPSVLQVVNLPIVERPVCKIVEGSDAEIGMSPWQVMLFRQECSIPVCGQDQVTVAMTPRRQECSIPVCGQDQVTVAMTPRSEGSSVNLSPPLEQCVPDRGQQYQGRSEGSSVNLSPPLEQCVPDRGQQYQGRGQQYQGRGQQYQGRVTGWGNLKYERNIEKYTACETARSGIECQLWRSGIECQLWRELLESYIDGRELLESYIDGRYNWRENLDRTATSEYQTFFNPRTATSEYQTFFNPRSPQELLCGASLISDRKSPQELLCGASLISDRTFGSGEADCGLRPLFEKTFGSGEADCGLRPLFEKHQDFNSAVQLVENFCRLAACLEGNCAEGLGTNYRTFGSGEADCGLRPLFEKKSEGSSVNLSPPLEQCVPDRDKLAACLEGNCAEGLGTNYRDKLAACLEGNCAEGLGTNYRGQPSVLQVVNLPIVERPVCKGQPSVLQVVNLPIVERPVCKIVEGSDAEIGMSPWQVMLFRQECSIPVCGQDQVTVAMTPRRQECSIPVCGQDQVTVAMTPRSEGSSVNLSPPLEQCVPDRGQQYQGRSEGSSVNLSPPLEQCVPDRGQQYQGRGQQYQGRGQQYQGRVTGWGNLKYERNIEKYGFYTHVFRELLESYIDGRELLESYIDGRYNWRENLDRDGKYGFYTHVFRGDACEGDSGGPFVMKTATSEYQTFFNPRTATSEYQTFFNPRSPQELLCGASLISDRRGDACEGDSGGPFVMKKSPQELLCGASLISDRTFGSGEADCGLRPLFEKTFGSGEADCGLRPLFEKHQDFNSAVQLVENFCRITDNMFCAGYKPDEGKRTFGSGEADCGLRPLFEKKITDNMFCAGYKPDEGKRSEGSSVNLSPPLEQCVPDRGQPSVLQVVNLPIVERPVCKGQPSVLQVVNLPIVERPVCKIVEGSDAEIGMSPWQVMLFRQECSIPVCGQDQVTVAMTPRRQECSIPVCGQDQVTVAMTPRSEGSSVNLSPPLEQCVPDRGQQYQGRSEGSSVNLSPPLEQCVPDRGQQYQGRVTGWGNLKYERNIEKYGFYTHVFRELLESYIDGRELLESYIDGRYNWRENLDRDGKYGFYTHVFRTATSEYQTFFNPRTATSEYQTFFNPRSPQELLCGASLISDRKSPQELLCGASLISDRTFGSGEADCGLRPLFEKTFGSGEADCGLRPLFEKITDNMFCAGYKPDEGKRTFGSGEADCGLRPLFEKKITDNMFCAGYKPDEGKRGDACEGDAGGPFVMKSPFNNRGQPSVLQVVNLPIVERPVCKGQPSVLQVVNLPIVERPVCKIVEGSDAEIGMSPWQVMLFRGQQYQGRGQQYQGRELLESYIDGRELLESYIDGRTATSEYQTFFNPRTATSEYQTFFNPRTFGSGEADCGLRPLFEKTFGSGEADCGLRPLFEKHQDFNSAVQLVENFCRTFGSGEADCGLRPLFEKKGQQYQGRGQQYQGRVTGWGNLKYERNIEKYGFYTHVFRELLESYIDGRELLESYIDGRYNWRENLDRDGKYGFYTHVFRGDACEGDSGGPFVMKSPQELLCGASLISDRRGDACEGDSGGPFVMKKSPQELLCGASLISDRHQDFNSAVQLVENFCRITDNMFCAGYKPDEGKRITDNMFCAGYKPDEGKRSEGSSVNLSPPLEQCVPDRGQPSVLQVVNLPIVERPVCKGQPSVLQVVNLPIVERPVCKIVEGSDAEIGMSPWQVMLFRSEGSSVNLSPPLEQCVPDRGQQYQGRSEGSSVNLSPPLEQCVPDRGQQYQGRELLESYIDGRELLESYIDGRTATSEYQTFFNPRTATSEYQTFFNPRTFGSGEADCGLRPLFEKTFGSGEADCGLRPLFEKTFGSGEADCGLRPLFEKKVTGWGNLKYERNIEKYGFYTHVFRELLESYIDGRELLESYIDGRYNWRENLDRDGKYGFYTHVFRGDACEGDSGGPFVMKSPQELLCGASLISDRRGDACEGDSGGPFVMKKSPQELLCGASLISDRTFGSGEADCGLRPLFEKTFGSGEADCGLRPLFEKITDNMFCAGYKPDEGKRTFGSGEADCGLRPLFEKKITDNMFCAGYKPDEGKRGQPSVLQVVNLPIVERPVCKGQPSVLQVVNLPIVERPVCKIVEGSDAEIGMSPWQVMLFRVTGWGNLKYERNIEKYGFYTHVFRELLESYIDGRELLESYIDGRYNWRENLDRDGKYGFYTHVFRGDACEGDSGGPFVMKSPQELLCGASLISDRRGDACEGDSGGPFVMKKSPQELLCGASLISDRTFGSGEADCGLRPLFEKTFGSGEADCGLRPLFEKITDNMFCAGYKPDEGKRTFGSGEADCGLRPLFEKKITDNMFCAGYKPDEGKRGQPSVLQVVNLPIVERPVCKGQPSVLQVVNLPIVERPVCKIVEGSDAEIGMSPWQVMLFRVTGWGNLKYERNIEKWIQKVIDQFYGFYTHVFRELLESYIDGRELLESYIDGRYNWRENLDRDGKYGFYTHVFRGDACEGDSGGPFVMKSPQELLCGASLISDRRGDACEGDSGGPFVMKKSPQELLCGASLISDRITDNMFCAGYKPDEGKRITDNMFCAGYKPDEGKRGQPSVLQVVNLPIVERPVCKGQPSVLQVVNLPIVERPVCKIVEGSDAEIGMSPWQVMLFRVTGWGNLKYERNIEKWIQKVIDQFYGFYTHVFRELLESYIDGRELLESYIDGRYNWRENLDRDGKYGFYTHVFRGDACEGDSGGPFVMKSPQELLCGASLISDRRGDACEGDSGGPFVMKKSPQELLCGASLISDRITDNMFCAGYKPDEGKRITDNMFCAGYKPDEGKRGQPSVLQVVNLPIVERPVCKGQPSVLQVVNLPIVERPVCKIVEGSDAEIGMSPWQVMLFRTATSEYQTFFNPRTATSEYQTFFNPRTFGSGEADCGLRPLFEKTFGSGEADCGLRPLFEKTFGSGEADCGLRPLFEKKVTGWGNLKWIQKVIDQFYGFYTHVFRELLESYIDGRELLESYIDGRYNWRENLDRDGKYGFYTHVFRGDACEGDSGGPFVMKSPQELLCGASLISDRRGDACEGDSGGPFVMKKSPQELLCGASLISDRITDNMFCAGYKPDEGKRITDNMFCAGYKPDEGKRGQPSVLQVVNLPIVERPVCKGQPSVLQVVNLPIVERPVCKIVEGSDAEIGMSPWQVMLFRVTGWGNLKYERNIEKYGFYTHVFRELLESYIDGRELLESYIDGRYNWRENLDRDGKYGFYTHVFRGDACEGDSGGPFVMKSPQELLCGASLISDRRGDACEGDSGGPFVMKKSPQELLCGASLISDRITDNMFCAGYKPDEGKRITDNMFCAGYKPDEGKRGQPSVLQVVNLPIVERPVCKGQPSVLQVVNLPIVERPVCKIVEGSDAEIGMSPWQVMLFRELLESYIDGXTFGSGEADCGLRPLFEKEQESKEENR

SEQ ID NO: 13 - protein, 1929 aa, Homo Sapien
ICVGCPRICVGCPRQVVAGLNFRQVVAGLNFRYFIDFVARYFIDFVARKYFIDFVARTVGSDTFYSFKAATGECTATVGKRYNSQNQSNNQFVLYRYNSQNQSNNQFVLYRSLWNGDTGECTDNAYIDIQLRIASFSQNCDIYPGKDFVQPPTKICVGCPRICVGCPRQVVAGLNFRQVVAGLNFRYFIDFVARYFIDFVARKYFIDFVARTVGSDTFYSFKAATGECTATVGKRYNSQNQSNNQFVLYRYNSQNQSNNQFVLYRSLWNGDTGECTDNAYIDIQLRIASFSQNCDIYPGKDFVQPPTKICVGCPRICVGCPRNGKHNGWKQVVAGLNFRQVVAGLNFRYFIDFVARYFIDFVARKYFIDFVARTVGSDTFYSFKAATGECTATVGKRYNSQNQSNNQFVLYRYNSQNQSNNQFVLYRSLWNGDTGECTDNAYIDIQLRIASFSQNCDIYPGKDFVQPPTKICVGCPRICVGCPRYFIDFVARYFIDFVARKYFIDFVARTVGSDTFYSFKAATGECTATVGKRYNSQNQSNNQFVLYRYNSQNQSNNQFVLYRIASFSQNCDIYPGKDFVQPPTKICVGCPRICVGCPRQVVAGLNFRQVVAGLNFRYFIDFVARYFIDFVARKYFIDFVARSLWNGDTGECTDNAYIDIQLRIASFSQNCDIYPGKDFVQPPTKSQFMQRDTIFYRSYAQAQRLPEVVYRKSQFMQRTWQWLPRTWQWLPRENTETPAATPKSYAQAQRMVEVDLHGRETVPDYLDHIKKPMDFFTMKMPREGMFHHGVPIPVPPLEVLKQSWCLKDCFATGRQANAESSKMPPRSSREQADSCRLSADRLTVRLSADRLTVRFTELRLLLDEEEALAKNTQLTLQVYREQADSCRQWLVEKLSDLDNKFSEASHKMNKTATKMKDLSARSFEAELKTQVEQNKVQELKDKEMEDTIKQEIQQEKKQEIQQEKKDFQAWLDTKKLQKAQEESSAMMQWLQKHSVWQRAHYTLGREGPLTYRVLQKLQKMVPQGRRAKSIIPNKKVVWVSLRKVVWVSLRDKQNLHENLQGLGPGVRDKQNLHENLQGLGPGVRFQTCLTMQEVFSQHRRQVQGGLTVFGMGQPSLSGFRHSVWQRAHYTLGREGPLTYRVLQKLQKMVPQGRRAKSIIPNKKVVWVSLRKVVWVSLRDKQNLHENLQGLGPGVRDKQNLHENLQGLGPGVRFQTCLTMQEVFSQHRRQVQGGLTVFGMGQPSLSGFREMAAQIREMAAQIRGHVYSRKTEAAAMKKGLDSYEEKQLKEALERQLKEALERVIKEMAAQIREMAAQIREVEQSRHSVWQRAHYTLGREGPLTYRVLQKLQKMVPQGRRAKSIIPNKKVVWVSLRKVVWVSLRDKQNLHENLQGLGPGVRDKQNLHENLQGLGPGVRFQTCLTMQEVFSQHRRQVQGGLTVFGMGQPSLSGFRQAWEAGRQEFEDRMELNTLKEEAVSSLREEAWLLNREEAWLLNRKEEAWLLNRDKEIELVIHRCSELKGQLGEAEGENLRRVQGASGKFRDTHKASDMLIRKEDIFRASDMLIREDIFRRDHPGLKAKGAIEVLIRVQGASGKLQAFGFCEYKRVQGASGKFRDTHKASDMLIRKEDIFRASDMLIREDIFRRDHPGLKAKGAIEVLIRVQGASGKLQAFGFCEYKTMHEDRDSSREGRMCVLELKEGRYHWREGRYHWRDARLLSPCSFPLFNLMFFGIKEDYVLVATQLSWLKTQLSWLKKTQLSWLKKRILSCRLTVPSSSRWVRSPWRLLATKWVRQPTLSAVSSCTAPPRPRSRHSQFMRHSQFMRYDQYVVSIYDQYVVSIHSQFMRLCARVYSPTFLALRGSCLYKVYSPTFLALRGSCLYKRILSCRLTVPSSSRWVRSPWRLLATKWVRQPTLSAVSSCTAPPRPRSR

SEQ ID NO: 14 - protein, 2986 aa, Homo Sapien
ICVGCPRICVGCPRQVVAGLNFRQVVAGLNFRYFIDFVARYFIDFVARKYFIDFVARTVGSDTFYSFKAATGECTATVGKRTWQDCEYKDAAKTVGSDTFYSFKYEIKYNSQNQSNNQFVLYRYNSQNQSNNQFVLYRDIPTNSPELEETLTHTITKSLWNGDTGECTDNAYIDIQLRIASFSQNCDIYPGKDFVQPPTKICVGCPRICVGCPRQVVAGLNFRQVVAGLNFRYFIDFVARYFIDFVARKYFIDFVARTVGSDTFYSFKAATGECTATVGKRTWQDCEYKDAAKTVGSDTFYSFKYEIKYNSQNQSNNQFVLYRYNSQNQSNNQFVLYRDIPTNSPELEETLTHTITKSLWNGDTGECTDNAYIDIQLRIASFSQNCDIYPGKDFVQPPTKICVGCPRICVGCPRQVVAGLNFRQVVAGLNFRYFIDFVARYFIDFVARKYFIDFVARTVGSDTFYSFKAATGECTATVGKRTWQDCEYKDAAKTVGSDTFYSFKYEIKYNSQNQSNNQFVLYRYNSQNQSNNQFVLYRDIPTNSPELEETLTHTITKSLWNGDTGECTDNAYIDIQLRIASFSQNCDIYPGKDFVQPPTKICVGCPRICVGCPRYFIDFVARYFIDFVARKYFIDFVARTVGSDTFYSFKAATGECTATVGKRTWQDCEYKDAAKTVGSDTFYSFKYEIKYNSQNQSNNQFVLYRYNSQNQSNNQFVLYRDIPTNSPELEETLTHTITKIASFSQNCDIYPGKDFVQPPTKICVGCPRICVGCPRQVVAGLNFRQVVAGLNFRYFIDFVARYFIDFVARKYFIDFVARDIPTNSPELEETLTHTITKSLWNGDTGECTDNAYIDIQLRIASFSQNCDIYPGKDFVQPPTKDGQLAGPRYYVKERTESALTEDLGKYYVKMPLGHIMRMPLGHIMRYAMTVWYFDAEERAEAKSFIADVEPIFDRLLFFWSDRSFIADVEPIFDRLLFFWSDRDGQLAGPRYYVKERTESALTEDLGKYYVKMPLGHIMRMPLGHIMRYAMTVWYFDAEERAEAKSFIADVEPIFDRLLFFWSDRSFIADVEPIFDRLLFFWSDRLLERCKYWPACKNGDECAYHHPISPCKMSELSVAQKPEKLLERYDAKCTKPDCPFTHVSRYDAKCTKPDCPFTHVSRAPEETIQSKVSHTFHMRVSHTFHMRMVSHTFHMRVTSPSPQQNPSSPSWQYVTSPSPQQNPSSPSWQYHQRVHGKHQRVHGKAFTLEERMAFTLEERIMRYYERIMRYYERAYDDLLDEFMQAVTDKAYDDLLDEFMQAVTDKNKYCMFNDDIQDDFSRQQSDLDKYIILMTLQDRVMQIGSRLVQVNSRQYIGEGAKMQYIGEGAKECQYQFRECQYQFRCHCKFHWCCYVKFNSPTTQDLVYIDPSPDYCVRTSEGMDGCELMCCGRGYDQFKEQGGAVVRNCDQVGRNDCSLPRNDCSLPRLDEVNASKGVGHSMVRKTWQWLPRRCLQSPSRRCLQSPSRENTETPAATPKDTIFYRAAVRHGPSSRGSLTPHPAACDKHGPSSRGSLTPHPAACDKEGMFHHGVPIPVPPLEVLKMPREGMFHHGVPIPVPPLEVLKKADSQQKELMLERGLIHYGRLQSEVDKDQEWSRMPPDVIRDLLDQLKAALCKTGKCLLQSLKCLLQSLKQQQRWKSWAVATLKQLRFYMKLLQQEEDKLLTMPSGERLLTMPSGERGYELKQFKVEEHSVMTVKLMGIFDTSWVSMKLMGIFDTSWVSMKLMGIFDTSWVSMKNSLLTILDQLQRCQRCQVLWMEGWSNSSMKEWIVIGQVDMEALVEKELLTPQQHYDWGLRALKWDKFELMMESHQLMIKWDKFELMMESHQLMIKQDEADAALQMITVSMQDASEQKCPLAWQSKWEGPEDPLQYLRGILTPSDEFQFWIEQAHRGNKNPNPFIPPDAASIVTEVNFTTTRFELMMESHQLMIKDQIEVMKLNEYMRFEECDKKKPWSMKDVMSQNYRSLGLTIQKRMDVMSQNYRIVHTGEKHYKAFYWSLSFTKHKVQEGGYNGLNQCLSITQSKCEECGKTFMQPSGLTLHKKADSQQKELMLERGLIHYGRLQSEVDKDQEWSRMPPDVIRDLLDQLKAALCKTGKCLLQSLKCLLQSLKQQQRWKSWAVATLKQLRFYMKLLQQEEDKLLTMPSGERLLTMPSGERGYELKQFKVEEHSVMTVKLMGIFDTSWVSMKLMGIFDTSWVSMKLMGIFDTSWVSMKCQVLWMEGWSNSSMKEWIVIGQVDMEALVEKELLTPQQHYDWGLRALKWDKFELMMESHQLMIKWDKFELMMESHQLMIKQDEADAALQMITVSMQDASEQKCPLAWQSKWEGPEDPLQYLRGILTPSDEFQFWIEQAHRGNKNPNPFIPPDAASIVTEVNFTTTRFELMMESHQLMIKDQIEVMKHSRSTACGLSTVGRHSRTNQPTWQNPISTKTNQPTWQNPISTKNTKVVGCCLLTPKCHTPPLYHMRANCYQREDANPSSRVSLSHACKYGAMALKSRVFVRVFTGQAKIVLHSLDLRANCYQRNAVKTDAPASALWDIMRNAVKTDAPASALWDIMRNCDQVGRNDCSLPRNDCSLPRLDEVNASKGVGHSMVRKTWQWLPRRCLQSPSRRCLQSPSRENTETPAATPKDTIFYRAAVRHGPSSRGSLTPHPAACDKHGPSSRGSLTPHPAACDKEGMFHHGVPIPVPPLEVLKMPREGMFHHGVPIPVPPLEVLKLPEVVYRTWQWLPRTWQWLPRENTETPAATPKDTIFYRAAVRSYAQAQRMVEVDLHGREGMFHHGVPIPVPPLEVLKETVPDYLDHIKKPMDFFTMKETVPDYLDHIKKPMDFFTMKMPREGMFHHGVPIPVPPLEVLKVMQIGSRLVQVNSRMAGSAMSSKECQYQFRECQYQFRCHCKFHWCCYVKFNSPTTQDLVYIDPSPDYCVRTSEGMDGCELMCCGRGYDQFK

SEQ ID NO: 15 - protein, 3867 aa, Homo Sapien
ICVGCPRICVGCPRQVVAGLNFRQVVAGLNFRYFIDFVARYFIDFVARKYFIDFVARKYFIDFVARTVGSDTFYSFKAATGECTATVGKRTWQDCEYKDAAKTVGSDTFYSFKYEIKYNSQNQSNNQFVLYRYNSQNQSNNQFVLYRKYNSQNQSNNQFVLYRDIPTNSPELEETLTHTITKSLWNGDTGECTDNAYIDIQLRIASFSQNCDIYPGKDFVQPPTKIASFSQNCDIYPGKDFVQPPTKICVGCPRICVGCPRQVVAGLNFRQVVAGLNFRYFIDFVARYFIDFVARKYFIDFVARKYFIDFVARTVGSDTFYSFKAATGECTATVGKRTWQDCEYKDAAKTVGSDTFYSFKYEIKYNSQNQSNNQFVLYRYNSQNQSNNQFVLYRKYNSQNQSNNQFVLYRDIPTNSPELEETLTHTITKSLWNGDTGECTDNAYIDIQLRIASFSQNCDIYPGKDFVQPPTKIASFSQNCDIYPGKDFVQPPTKICVGCPRICVGCPRQVVAGLNFRQVVAGLNFRYFIDFVARYFIDFVARKYFIDFVARKYFIDFVARTVGSDTFYSFKAATGECTATVGKRTWQDCEYKDAAKTVGSDTFYSFKYEIKYNSQNQSNNQFVLYRYNSQNQSNNQFVLYRKYNSQNQSNNQFVLYRDIPTNSPELEETLTHTITKSLWNGDTGECTDNAYIDIQLRIASFSQNCDIYPGKDFVQPPTKIASFSQNCDIYPGKDFVQPPTKICVGCPRICVGCPRYFIDFVARYFIDFVARKYFIDFVARKYFIDFVARTVGSDTFYSFKAATGECTATVGKRTWQDCEYKDAAKTVGSDTFYSFKYEIKYNSQNQSNNQFVLYRYNSQNQSNNQFVLYRKYNSQNQSNNQFVLYRDIPTNSPELEETLTHTITKIASFSQNCDIYPGKDFVQPPTKIASFSQNCDIYPGKDFVQPPTKICVGCPRICVGCPRQVVAGLNFRQVVAGLNFRYFIDFVARYFIDFVARKYFIDFVARKYFIDFVARDIPTNSPELEETLTHTITKSLWNGDTGECTDNAYIDIQLRIASFSQNCDIYPGKDFVQPPTKIASFSQNCDIYPGKDFVQPPTKLQNAAERANGTADVRNSKAGSGGKSIMTDIKGLIHYGRLQSEVDKINNMYRMPPDVIRDLLDQLKAALCKTGKTHLKDSRCLLQSLKCLLQSLKQQQRWKLLQQEEDKLLTMPSGERLLTMPSGERVEEHSVMTVKVEEHSVMTVKSLRMPPDVIRLMGIFDTSWVSMKLMGIFDTSWVSMKLMGIFDTSWVSMKNSLLTILDQLQRCQRCQVLWMEGWSNSSMKEWIVIGQVDMEALVEKCQVLWMEGWSNSSMKKELLTPQQHYDWGLRALKWDKFELMMESHQLMIKQDEADAALQMITVSMQDASEQKGILTPSDEFQFWIEQAHRGNKGILTPSDEFQFWIEQAHRGNKFELMMESHQLMIKDQIEVMKFELMMESHQLMIKDQIEVMKLLERCKYWPACKNGDECAYHHPISPCKMSELSVAQKPEKLLERYDAKCTKPDCPFTHVSRAPSESGPRRCPYTKSVHLTDRSEPSIRRIWFQNRLAHQLGQRIQHVLHKKWWWRGGRWWWRGGRDSLGNSKGENAANWLTAKMPGPPPATLGSPHSSPFGPRLLRPTRPPRAMAAGGCWRQSRPANKDTIFYREQGGAVVRKEMTALRNDCSLPRNDCSLPRGVGHSMVRKTWQWLPRRCLQSPSRRCLQSPSRENTETPAATPKENTETPAATPKDTIFYRAAVRHGPSSRGSLTPHPAACDKHGPSSRGSLTPHPAACDKEGMFHHGVPIPVPPLEVLKMPREGMFHHGVPIPVPPLEVLKMPREGMFHHGVPIPVPPLEVLKVAEVETREQGEAERLQEEARKLQELERDKLQELERDKLLTVLPSLLDKGSLSVLLDDLQDLSEAISKEEAVCQGDNLDRCSSSNPQMSSTVPIEQKGASSHQPRKFFSCRSHIQQFVKSHIQQFVKAGTPVSELTKIPYKLELKIPYKLELKAELLEQSRGRAELLEQSRGRVEAKPCTSNCREGPTPPDWLGSSGSKGGREGPTPPDWLGSSGSKVPLFPENGLHQQPEPLLPNNMKVPLFPENGLHQQPEPLLPNNMKLQNAAERANGTADVRKADSQQKNSKAGSGGKSIMTDIKGLIHYGRLQSEVDKINNMYRMPPDVIRDLLDQLKAALCKTGKTHLKDSRCLLQSLKCLLQSLKQQQRWKLLQQEEDKLLTMPSGERLLTMPSGERVEEHSVMTVKVEEHSVMTVKSLRMPPDVIRLMGIFDTSWVSMKLMGIFDTSWVSMKLMGIFDTSWVSMKNSLLTILDQLQRCQRCQVLWMEGWSNSSMKEWIVIGQVDMEALVEKCQVLWMEGWSNSSMKKELLTPQQHYDWGLRALKWDKFELMMESHQLMIKQDEADAALQMITVSMQDASEQKCPLAWQSKWEGPEDPLQYLRGILTPSDEFQFWIEQAHRGNKFELMMESHQLMIKDQIEVMKFELMMESHQLMIKDQIEVMKQSRPANKDTIFYRKEMTALRNDCSLPRNDCSLPRGVGHSMVRKTWQWLPRRCLQSPSRRCLQSPSRENTETPAATPKENTETPAATPKDTIFYRAAVRHGPSSRGSLTPHPAACDKHGPSSRGSLTPHPAACDKEGMFHHGVPIPVPPLEVLKMPREGMFHHGVPIPVPPLEVLKMPREGMFHHGVPIPVPPLEVLKSVASKADKHAKHHGKCQTCERNGLIPQSKQEPKDEKAHGRQEPKHGVTTCSLRHGVTTCSLRKHGVTTCSLRKHGVTTCSLRRFWSLQDLTRHMRSHTGERPYKLQNAAERANGTADVRNSKAGSGGKSIMTDIKGLIHYGRLQSEVDKINNMYRMPPDVIRDLLDQLKAALCKTGKTHLKDSRCLLQSLKCLLQSLKQQQRWKLLQQEEDKLLTMPSGERLLTMPSGERVEEHSVMTVKVEEHSVMTVKSLRMPPDVIRLMGIFDTSWVSMKLMGIFDTSWVSMKLMGIFDTSWVSMKNSLLTILDQLQRCQRCQVLWMEGWSNSSMKEWIVIGQVDMEALVEKCQVLWMEGWSNSSMKKELLTPQQHYDWGLRALKWDKFELMMESHQLMIKQDEADAALQMITVSMQDASEQKCPLAWQSKWEGPEDPLQYLRGILTPSDEFQFWIEQAHRGNKFELMMESHQLMIKDQIEVMKFELMMESHQLMIKDQIEVMKMFLFSRCAVQDYTYRYTTYLPRLPKTRTPISTYSDSYRTRTPISTYSDSYRNAVCCYNSPAVILPISEPLNAYEREVMVNMLNSLSRCAVQDYTYRGSISGHPYLPEKSRSELGRQPIPEPKSAVNKDGKLCVSMSKSHDTLVRRPTLEGRMAEVIGSKWHDLLRVLSRAFRRNLPPGIREGVLIDAMREGVLIDAMRSYVLVESVCKEAFEELFAQTFSKEAFEELFAQTFSKFMLFATQNPPGLYGGRVQSGAEVKRPDQRREHSGPGLPGQGLLPREHSGPGLPGQGLLPRTGDGVVELRDTIFYRTWQWLPRTWQWLPRENTETPAATPKENTETPAATPKDTIFYRAAVRSYAQAQRMVEVDLHGREGMFHHGVPIPVPPLEVLKETVPDYLDHIKKPMDFFTMKETVPDYLDHIKKPMDFFTMKMPREGMFHHGVPIPVPPLEVLKMPREGMFHHGVPIPVPPLEVLKSNVTLRKVTPEVKRVNARMNKVNARMNKDLNNFIKDVPKATISRDVPKATISRGEELDNLIKGEELDNLIKTFLQDNSWIKAKSLESLIYMSTRDMCTYCRKPLGVETKQTIHCEPCYPKIMAKDQNLENLIEVNSHVSENKNNQSQDLDNLIKVKPSALR

SEQ ID NO: 16 - protein, 2871 aa, Homo Sapien
AVDAALKKICVGCPRICVGCPRQVVAGLNFRQVVAGLNFRYFIDFVARYFIDFVARKYFIDFVARTVGSDTFYSFKAATGECTATVGKRTWQDCEYKDAAKTVGSDTFYSFKYEIKYNSQNQSNNQFVLYRYNSQNQSNNQFVLYRDIPTNSPELEETLTHTITKSLWNGDTGECTDNAYIDIQLRIASFSQNCDIYPGKDFVQPPTKIASFSQNCDIYPGKDFVQPPTKAVDAALKKICVGCPRICVGCPRQVVAGLNFRQVVAGLNFRYFIDFVARYFIDFVARKYFIDFVARTVGSDTFYSFKAATGECTATVGKRTWQDCEYKDAAKTVGSDTFYSFKYEIKYNSQNQSNNQFVLYRYNSQNQSNNQFVLYRDIPTNSPELEETLTHTITKSLWNGDTGECTDNAYIDIQLRIASFSQNCDIYPGKDFVQPPTKIASFSQNCDIYPGKDFVQPPTKAVDAALKKICVGCPRICVGCPRQVVAGLNFRQVVAGLNFRYFIDFVARYFIDFVARKYFIDFVARTVGSDTFYSFKAATGECTATVGKRTWQDCEYKDAAKTVGSDTFYSFKYEIKYNSQNQSNNQFVLYRYNSQNQSNNQFVLYRDIPTNSPELEETLTHTITKSLWNGDTGECTDNAYIDIQLRIASFSQNCDIYPGKDFVQPPTKIASFSQNCDIYPGKDFVQPPTKAVDAALKKICVGCPRICVGCPRYFIDFVARYFIDFVARKYFIDFVARTVGSDTFYSFKAATGECTATVGKRTWQDCEYKDAAKTVGSDTFYSFKYEIKYNSQNQSNNQFVLYRYNSQNQSNNQFVLYRDIPTNSPELEETLTHTITKIASFSQNCDIYPGKDFVQPPTKIASFSQNCDIYPGKDFVQPPTKICVGCPRICVGCPRQVVAGLNFRQVVAGLNFRYFIDFVARYFIDFVARKYFIDFVARDIPTNSPELEETLTHTITKSLWNGDTGECTDNAYIDIQLRIASFSQNCDIYPGKDFVQPPTKIASFSQNCDIYPGKDFVQPPTKLGHIMRFWNLTRYYVKERTESALTEDLGKYYVKMPLGHIMRMPLGHIMRYAMTVWYFDAEERAEAKSFIADVEPIFDRLLFFWSDRSFIADVEPIFDRLLFFWSDRSNVTLRKMSNVTLRMSNVTLRTYVENSKVNARMNKVNQRTDKDLNNFIKDVPKATISRDVPKATISRGEELDNLIKGEELDNLIKTFLQDNSWIKAKSLESLIYMSTRDMCTYCRKPLGVETKQTIHCEPCYPKIMAKDQNLENLIEVNSHVSENKNNQSQDLDNLIKVKPSALRDEEKQRFYLQNRALHFVFKALHFVFKDVLGMKVLRDVLGMKVLRIYEKDEEKSLNYWCNLLGMKLGNDFMGITLASSQAVSNAREQYLQKIYFDTRDDEVAIRWQNSKRCQQPCKYLLMGGRLNYQHRVNIPFVRNGNQDCRNPHQGRRLLICSHKLEEIEIIKLEEIEIIKAYMSIMTQMKVQIVSAIGYPRGHWFKFTQEDEQLVQEKMEALKWQLYRLWLQLYQADTRAYMSIMTQMKESEQELHEGAKLQEDLHILKDAQVVGMTTTGAAKAYMSIMTQMKESEQELHEGAKAYMSIMTQMKESEQELHEGAKRQNAFPKMPYLMVKRMSVFTISVQHYADGSSQLGQKRTKMSVFTISVQHYADGSSQLGQKWELLTRECARERGAAGGVWGRGRFTISRGAAGGVWGRRGAAGGVWGRRWELLTRGAFDIWGQGTMVTSLLGDSKATSESDGRMSQRQGKMSQRQGKCSSLLKRDSSTSSKLTKAINAKDQTEATQEKAINAKDQTEATQEKENDQEHDESDNEVMGKKTDNSEVFWNPTPDIKATSESDGRCWMDALELALKLGKEVLATLEGHWDSEVFITDKLGKEVLATLEGHWDSEVFITDKNGQWVGTVLLNACEIIERPSKKNGQWVGTVLLNACEIIERPSKKPLGHIMRYYVKERTESALTEDLGKYYVKMPLGHIMRMPLGHIMRYAMTVWYFDAEERAEAKSFIADVEPIFDRLLFFWSDRSFIADVEPIFDRLLFFWSDRQSMVTLKETSVVRKQSMVTLKLGSGGVVKKEELNMSKTVSPSTIRTIQQNITEQASVMQKRTIQQNITEQASVMQKRTIQQNITEQASVMQKRGLPHMFQQGGVFYSIMKKVGDVQGQESESQLPTKIILTGQKEMYSLCLLATLMGEDVWSYAKEMYSLCLLATLMGEDVWSYAKPLGHIMRYYVKERTESALTEDLGKYYVKMPLGHIMRMPLGHIMRYAMTVWYFDAEERAEAKSFIADVEPIFDRLLFFWSDRSFIADVEPIFDRLLFFWSDRLSPWAARSDAETKRSTHRGTRLGDDFNRQEVVFVKLLRNSGGRAESSSESDHFRLGDDFNRELSRGCIKVLKTSKIDMKTLSDATTKQIKSMLQGAGHEIREAIQHPADEKMTNPAIQNDFSYYRRINNVPAEGENEVNNELANRVMVGVIILYDHVHPAGAFAKMPPRSSRQANAESSKGKFTELRVSSPRLVSNRPFTELRLLLDEEEALAKNTQLTLQVYREQADSCREQYLQKDDEVAIRICVALSRCQQPCKLNYQHRVNIPFVRLLICSHKLEEIEIIKLEEIEIIKAYMSIMTQMKFTQEDEQLVQEKMEALKWQLYRLWLQLYQADTRAYMSIMTQMKESEQELHEGAKLQEDLHILKDAQVVGMTTTGAAKAYMSIMTQMKESEQELHEGAKAYMSIMTQMKESEQELHEGAKIQHYAGKASVATLMKMAKMEVKGAEVNQVKVNGLDESKSLRDQDKYFWHMKLSQFKEQLLQSNPVLEAFGNAKRPPTAGSQFKASVATLMKLVMSYVAAVCGKGAEVNQVK

SEQ ID NO: 17 - protein, 1100 aa, Homo Sapien
IIAPPERKAGFAGDDAPRAGFAGDDAPRIKIIAPPERGYSFTTTAERGYSFTTTAERAVFPSIVGRPRAVFPSIVGRPRQEYDESGPSIVHRQEYDESGPSIVHRGYSFTTTAEREIVRLDLAGRDLTDYLMKSYELPDGQVITIGNERSYELPDGQVITIGNERVAPEEHPVLLTEAPLNPKDLYANTVLSGGTTMYPGIADRIIAPPERKAGFAGDDAPRAGFAGDDAPRIKIIAPPERGYSFTTTAERGYSFTTTAERAVFPSIVGRPRAVFPSIVGRPRQEYDESGPSIVHRQEYDESGPSIVHRGYSFTTTAEREIVRLDLAGRDLTDYLMKSYELPDGQVITIGNERSYELPDGQVITIGNERVAPEEHPVLLTEAPLNPKDLYANTVLSGGTTMYPGIADRIIAPPERKAGFAGDDAPRAGFAGDDAPRIKIIAPPERGYSFTTTAERGYSFTTTAERAVFPSIVGRPRAVFPSIVGRPRQEYDESGPSIVHRQEYDESGPSIVHRGYSFTTTAEREIVRLDLAGRDLTDYLMKSYELPDGQVITIGNERSYELPDGQVITIGNERVAPEEHPVLLTEAPLNPKDLYANTVLSGGTTMYPGIADRIIAPPERKAGFAGDDAPRAGFAGDDAPRIKIIAPPERGYSFTTTAERGYSFTTTAERAVFPSIVGRPRAVFPSIVGRPRQEYDESGPSIVHRQEYDESGPSIVHRGYSFTTTAEREIVRLDLAGRDLTDYLMKSYELPDGQVITIGNERSYELPDGQVITIGNERVAPEEHPVLLTEAPLNPKDLYANTVLSGGTTMYPGIADRIIAPPERKAGFAGDDAPRAGFAGDDAPRIKIIAPPERGYSFTTTAERGYSFTTTAERAVFPSIVGRPRAVFPSIVGRPRQEYDESGPSIVHRQEYDESGPSIVHRGYSFTTTAEREIVRLDLAGRDLTDYLMKSYELPDGQVITIGNERSYELPDGQVITIGNERVAPEEHPVLLTEAPLNPKDLYANTVLSGGTTMYPGIADRAGFAGDDAPRAVFPSIVGRPRQEYDESGPSIVHRSYELPDGQVITIGNERMESGDEAAIERHRGPQPSHWAAGDGPTQER

SEQ ID NO: 18 - protein, 1054 aa, Homo Sapien
IIAPPERKAGFAGDDAPRAGFAGDDAPRIKIIAPPERGYSFTTTAERGYSFTTTAERAVFPSIVGRPRAVFPSIVGRPRQEYDESGPSIVHRQEYDESGPSIVHRGYSFTTTAEREIVRLDLAGRDLTDYLMKSYELPDGQVITIGNERSYELPDGQVITIGNERVAPEEHPVLLTEAPLNPKDLYANTVLSGGTTMYPGIADRIIAPPERKAGFAGDDAPRAGFAGDDAPRIKIIAPPERGYSFTTTAERGYSFTTTAERAVFPSIVGRPRAVFPSIVGRPRQEYDESGPSIVHRQEYDESGPSIVHRGYSFTTTAEREIVRLDLAGRDLTDYLMKSYELPDGQVITIGNERSYELPDGQVITIGNERVAPEEHPVLLTEAPLNPKDLYANTVLSGGTTMYPGIADRIIAPPERKAGFAGDDAPRAGFAGDDAPRIKIIAPPERGYSFTTTAERGYSFTTTAERAVFPSIVGRPRAVFPSIVGRPRQEYDESGPSIVHRQEYDESGPSIVHRGYSFTTTAEREIVRLDLAGRDLTDYLMKSYELPDGQVITIGNERSYELPDGQVITIGNERVAPEEHPVLLTEAPLNPKDLYANTVLSGGTTMYPGIADRIIAPPERKAGFAGDDAPRAGFAGDDAPRIKIIAPPERGYSFTTTAERGYSFTTTAERAVFPSIVGRPRAVFPSIVGRPRQEYDESGPSIVHRQEYDESGPSIVHRGYSFTTTAEREIVRLDLAGRDLTDYLMKSYELPDGQVITIGNERSYELPDGQVITIGNERVAPEEHPVLLTEAPLNPKDLYANTVLSGGTTMYPGIADRIIAPPERKAGFAGDDAPRAGFAGDDAPRIKIIAPPERGYSFTTTAERGYSFTTTAERAVFPSIVGRPRAVFPSIVGRPRQEYDESGPSIVHRQEYDESGPSIVHRGYSFTTTAEREIVRLDLAGRDLTDYLMKSYELPDGQVITIGNERSYELPDGQVITIGNERVAPEEHPVLLTEAPLNPKDLYANTVLSGGTTMYPGIADRAGFAGDDAPRAVFPSIVGRPRQEYDESGPSIVHR

SEQ ID NO: 19 - protein, 1229 aa, Homo Sapien
  misc_feature (1130)..(1130): Xaa can be any naturally occurring amino acid
IIAPPERKAGFAGDDAPRAGFAGDDAPRGYSFTTTAERGYSFTTTAERAVFPSIVGRPRAVFPSIVGRPRDSYVGDEAQSKRQEYDESGPSIVHRQEYDESGPSIVHRGYSFTTTAEREIVRLDLAGRDLTDYLMKSYELPDGQVITIGNERSYELPDGQVITIGNERVAPEEHPVLLTEAPLNPKDLYANTVLSGGTTMYPGIADRIIAPPERKAGFAGDDAPRAGFAGDDAPRGYSFTTTAERGYSFTTTAERAVFPSIVGRPRAVFPSIVGRPRDSYVGDEAQSKRQEYDESGPSIVHRQEYDESGPSIVHRGYSFTTTAEREIVRLDLAGRDLTDYLMKSYELPDGQVITIGNERSYELPDGQVITIGNERVAPEEHPVLLTEAPLNPKDLYANTVLSGGTTMYPGIADRIIAPPERKAGFAGDDAPRAGFAGDDAPRGYSFTTTAERGYSFTTTAERAVFPSIVGRPRAVFPSIVGRPRDSYVGDEAQSKRQEYDESGPSIVHRQEYDESGPSIVHRGYSFTTTAEREIVRLDLAGRDLTDYLMKSYELPDGQVITIGNERSYELPDGQVITIGNERVAPEEHPVLLTEAPLNPKDLYANTVLSGGTTMYPGIADRIIAPPERKAGFAGDDAPRAGFAGDDAPRGYSFTTTAERGYSFTTTAERAVFPSIVGRPRAVFPSIVGRPRDSYVGDEAQSKRQEYDESGPSIVHRQEYDESGPSIVHRGYSFTTTAEREIVRLDLAGRDLTDYLMKSYELPDGQVITIGNERSYELPDGQVITIGNERVAPEEHPVLLTEAPLNPKDLYANTVLSGGTTMYPGIADRIIAPPERKAGFAGDDAPRAGFAGDDAPRGYSFTTTAERGYSFTTTAERAVFPSIVGRPRAVFPSIVGRPRDSYVGDEAQSKRQEYDESGPSIVHRQEYDESGPSIVHRGYSFTTTAEREIVRLDLAGRDLTDYLMKSYELPDGQVITIGNERSYELPDGQVITIGNERVAPEEHPVLLTEAPLNPKDLYANTVLSGGTTMYPGIADRAGFAGDDAPRAVFPSIVGRPRQEYDESGPSIVHRSYELPDGQVITIGNERMESGDEAAIERHRGPQPSHWAAGDGPTQERCSSSPRDAPRGGSNXSSPSRRHRMFSLIGRSLSGSSPWRQITDSSLGRIRHFGMLSRGDFGLKGEPGRMWATQGLAVRSSLLGACLRNSWLDWRRVCLNTSILGRCSPSSLGLR

SEQ ID NO: 20 - protein, 3148 aa, Homo Sapien
TMMSVSRTMMSVSRNASKVANKGAASRFVKNALWEPKLDPLEQAKLDPLEQAKFVKNALWEPKEINFYKQKQQSAKQKQQSAKRTMFQKRTMFQKDEEILLKHHLEFGKMKVQEEKAFLNCDRMSLFMYRFHIPQEALVREPLDESGWMIKHHLEFGKTLLRHHLEFGKTLLREINFYKVIDYILHGKVKQMFRDSMLGDRMMSTRRVENTAKRRVENTAKVKQMFRVSGPGVRRSQKPGRRRTASAPTKVKQALGLKFLQVEQKSKSNPNLRLSHSLGLPGGTRRRLSHSLGLPGGTRYLMAGISDEDSLARTSSSTQLKSEGSGGTQLKMQKSEGSGGTQLKMQKSEGSGGTQLKTINPFGEQSRVPSAFAAIYSKTSSSTQLKSEGSGGTQLKMQKSEGSGGTQLKMQKSEGSGGTQLKTINPFGEQSRVPSAFAAIYSKTSSSTQLKSEGSGGTQLKMQKSEGSGGTQLKMQKSEGSGGTQLKTINPVHSDDEVFERVKQMFRDSMLGDRMMSTRRVENTAKRRVENTAKVKQMFRVSGPGVRRSQKPGRRRTASAPTKVKQALGLKFLQVEQKSKSNPNLRLSHSLGLPGGTRRRLSHSLGLPGGTRYLMAGISDEDSLARTIYLCRSSADSSRKKFASALSKVWTSQLKLPYEQWKDLRVWTSQLKYQKQQKSGRSPAPRVWFQNRMPSPRPRLTENQVRAQLAARLKAQLAARLKELDRERELDRERMGGTTSTRMGGTTSTRGGTTSTRRSEEERAKQAKELDRKSSMVALKYKLLESKNLEVEHRLRQQAEIKLRQQAEIKESSLSRQSKNYEALKQRQKGQLEDLEKQKGQLEDLEKETEVLQTDHKQASEYESLISKDLEDRYNQLLKDLEDRYNQLLKSVSGKTPGDFYDRSSSQENLLDEVMKTLVTLREDLVSEKLIEVERNNATLQAEKKTEDTYFISSAGKPTPGTQGKTLLEQNMESKDLFHVEQRTLLEQNMESKDLFHVEQRLMALGPIRLMALGPIRFVTISGQKDFTELQKYSEIQDRYSEIQDRKEVMEHRQQVQFMLKQQVQFMLKLEEEVEACKVVKAQIQEQKNCPISAKLERNCPISAKLERAFSIDIIRHKQISEQLNALNKQISEQLNALNKLLEVWIEFGREKTLLPEDSQKGDLRFVTISGQKQPVYDTTIRTGRQPVYDTTIRTGRARQEQLELTLGRTGSLEEMTQRLRNTISVKAVCDYRLNDALDRLEELKEETYNQLLDKGRLMLLSRDDSGSGSKQTTGEEVLLIQEKLLEVWIEFGRIKELNPEEGEMVEEKHMLEEEGTLDLLGLKKLLPQAEMFEHLSGKQEFIDGILASKFPTTKALIAEHQTFMEEMTRLLSDTVASDPGVLQEQLATTKMSELRVTLDPVQLESSLLREALAGLLVTYPNSQEAENWKEALAGLLVTYPNSQEAENWKEMFSQLADLDDELDGMGAIGRAAQIAGAVRATPAHRARGNMRSCRGNMRSCRLTDFGFGRSCRVLLHMRSCRVLLHMRGHQGGGPAASAPGLRGAPGHPLRPQEVRCENVLLSPDERRLEAGWFQPFLQPRALGQGGARLMALGPIRLMALGPIRFVTISGQKDFTELQKKEVMEHRQQVQFMLKQQVQFMLKLEEEVEACKVVKAQIQEQKNCPISAKLERNCPISAKLERAFSIDIIRHKQISEQLNALNKQISEQLNALNKLLEVWIEFGREKTLLPEDSQKGDLRFVTISGQKQPVYDTTIRTGRQPVYDTTIRTGRARQEQLELTLGRTGSLEEMTQRLRNTISVKAVCDYRLNDALDRLEELKEETYNQLLDKGRLMLLSRDDSGSGSKQTTGEEVLLIQEKLLEVWIEFGRIKELNPEEGEMVEEKHMLEEEGTLDLLGLKKLLPQAEMFEHLSGKQEFIDGILASKFPTTKALIAEHQTFMEEMTRLLSDTVASDPGVLQEQLATTKMSELRVTLDPVQLESSLLREALAGLLVTYPNSQEAENWKEALAGLLVTYPNSQEAENWKEMFSQLADLDDELDGMGAIGRLMALGPIRLMALGPIRFVTISGQKDFTELQKYSEIQDRYSEIQDRKEVMEHRQQVQFMLKQQVQFMLKLEEEVEACKVVKAQIQEQKNCPISAKLERNCPISAKLERAFSIDIIRHKQISEQLNALNKQISEQLNALNKLLEVWIEFGREKTLLPEDSQKGDLRFVTISGQKQPVYDTTIRTGRQPVYDTTIRTGRARQEQLELTLGRTGSLEEMTQRLRNTISVKAVCDYRLNDALDRLEELKEETYNQLLDKGRLMLLSRDDSGSGSKQTTGEEVLLIQEKLLEVWIEFGRIKELNPEEGEMVEEKHMLEEEGTLDLLGLKKLLPQAEMFEHLSGKQEFIDGILASKFPTTKALIAEHQTFMEEMTRLLSDTVASDPGVLQEQLATTKMSELRVTLDPVQLESSLLREALAGLLVTYPNSQEAENWKEALAGLLVTYPNSQEAENWKEMFSQLADLDDELDGMGAIGRQLNLLQKRFSNIDKFALTAETKRNFSNMKSLTGYLEKSLTGYLEKAELEHWKIPAWWKKRLELWLRRLELWLRVNDLIEFRSVAMMVPDRSVAMMVPDRTWREMDIRNMKLIESKPKNMKLIESKPKAVLLIGEQGTAKLLSDIFIPALRLLSDIFIPALRVDTLHYAWEKTSIIDFTVTMKLKEASESVAALSKRLLSDIFIPALRLPNPAYTPEISARLVSVLSTIINSTKKNFSNMKMMLAEYQRERWTEQSQEFAAQTKELLSHFNHQNMDALLKVTREAALTLPREAALTLPREILNNHGKDAAPGASKLRDAAPGASKLRGVVDHLLLRGVVDHLLLRQPWHGKAMQRNNEFPVFDEFNNEFPVFDEFGGSPAVTLLISEKASEAGATAPKASARISAPNEFDVMFKLSRDDISTAAGMVKDDVDMLRDYDALRKLEQEYSRRENGQLLRRENGQLLRAHGPEVQAHNKAHGPEVQAHNKKAANEEMEALRLADVEQELSFKKLADVEQELSFKKDDNSATKTLSAAARLQTEVELAESKLKAANEEMEALRQIKVQKGSEPLGISIVSGEKDLNPGVKKDLNPGVKKMSLGQLQSARGTCSGFEPHSWRGVACLGCKGTCSGFEPH

SEQ ID NO: 21 - protein, 1148 aa, Homo Sapien
CQNMLRNPNKDVRVSWIKDKELLDLHKQPTEAMMGLAQLYKEAMMGLAQLYKIYAPEAPYTSHDKLKIYAPEAPYTSHDKLKKGENGNGRNYPLEKRNYPLEKRMASRNYPLEKMASRNYPLEKMQLLSLRQLGAQRTSSSTQLKSEGSGGTQLKSSLSTSSPESARSSLSTSSPESARSKIPTYCSICCEQRYTKHKANAYKETELDIRTCRETELDIRAMQTGVTGIMIAREQRHWDISSSERMAEGTAEAPLENGGGGDSGAGALERSQPVHILAVDKVEQTPRMQAAGPLFRMQAAGPLFRSKGQCLSSRRDHLQRMDPGSRWRWRNLPSGPSLKWRNLPSGPSLKALEGRVFKALEGRVFKAEGFLVAEKQNLMTFGTPVLRMLDLVQAQILELKAQSQTDRMAVMAPRESRSLSGDLNVKAQSQTDRNVKAQSQTDRDYIALNEDLREGDGGVMSLRESRRPCGMGKRPCGMGKFLRSCVWDGNTPLKKSVGPETAENESKLLMKSVGPETAENESKLLMKLEMHGLWEGSQEGDGWQRADMSPCPHLPLITPGICMFKIYADPTKIYADPTKRANISVHPDKLKFSTSSLLLRIRDPYCHPVCANRNAVKANISVHPDKEPMNPIKQYVKDGKLYKVPDGKLYKVPDGKFHDIDDVKILSCGEVIHVKILSCGEVIHVKRAMALYHTEERTSSSTQLKSEGSGGTQLKSSLSTSSPESARSSLSTSSPESARSKIPTYCSICCMTEEFRLLCMYRLKICYFMRLKICYFMRWYLSSTELAEKMTEEFRLLCMYRLKICYFMRLKICYFMRWYLSSTELAEKLCQMEAFMRKLCQMEAFMRKLCQMEAFMRGPPHGWPKGWGRNYASIIRCVCAGCRAAPSRRDCMWSGFSARMCVCAGCRAAPSRQNESVSRVTLGENSRAEIENEDYSAMCALLNSGGGVIKACASFIRRQEYQKTQQEIEDKRSGPPASYCAKALQEYSSISEKALQEYSSISEKALTNIQNCMAEKLPDGDCRRLPGVNSKGVCQPPVQGRPPLDVSWWKTFVQSKKDLLQAKREIEFLPSRTSLYSEDDCKFKTQEYPEGRFKTQEYPEGRDEFAEDRIYRDEFAEDRIYRWMLAGRPHPTLKGFSGGMKGCLGTWR

SEQ ID NO: 22 - protein, 1255 aa, Homo Sapien
RGEDYLKYDPRHNRHFTASLAPRMYITCGRRNFVAFSRTDKAWHGMATLLNKDTVASALMYHRILLAASCDYFRCQGAKHNGKHNGKGGADAAEGSPDAHHPGLFMFEPILEEKMESLSSRMSGRVGDLSPKVGDLSPKQAETLAKVGDLSPKQAETLAKMEEEGGAMEKMMEEEGGAMEKMEEEGGAMEKVSKMEEEGGAMEKVSKSGGYGFGRSLNVASGSGKGDNALKDARNEISELTRNEISELTRSRGSANDYKQLETLSGDRQLETLSGDRKQLETLSGDRNNLEPILEGYISNLRKVTPCSECKSPAREPGDVSARDLGSDAGSSSSSSRDLGSDAGSSSSSSRMDLGSDAGSSSSSSRRGEDYLKYDPRHNRHFTASLAPRMYITCGRRNFVAFSRTDKAWHGMATLLNKDTVASALMYHRILLAASCDYFRGLEAADKKESEEGCPKLFDDSDERGFEGSCSQKMQELYGDGKVFDDESDEKGDGLCCYLKRARHFSEHPSTSKTEDGGEFEEGASENNAKAGELADKKMLANFESGKMLANFESGKFYGDLMEKDASPSKEERDIIGVAETGSGKEDYSITTKGGKVFLMSESEKRAGAKDILVATDVAGRAGAKDILVATDVAGRIEESDQGPYAIILAPTRCNTPTYCDLGKMCNTPTYCDLGKMCNTPTYCDLGKAAKVTPCSECKSPAREPGDVSARDLGSDAGSSSSSSRDLGSDAGSSSSSSRMDLGSDAGSSSSSSRNRLICRWVSSRERNEEAQVHDKEMESPECMKEMESPECMKYGTDLLLYRKNAEDIEQLYGKEMESPECMKREMESPECMKREMESPECMKREAGGCVRGRAESRSGAQRRAPAPAGQQQMRGGGGVSFTKACPWREPIREVDTNVATGAPPRHCSAPEDPIFRAGELADKKMLANFESGKMLANFESGKFYGDLMEKDASPSKEERDIIGVAETGSGKEDYSITTKGGKVFLMSESEKRAGAKDILVATDVAGRAGAKDILVATDVAGRIEESDQGPYAIILAPTRCCKATEKDVASCIDREYFDEMKEYFDEMKVECANNALKVECANNALKDQIQAELDSKFNDDFIETRRFNDDFIETRRDVASCIDRCCKMGYMMAKAEVDKDDKMGYMMAKKLDARNSRYRDLQFRDRDCSGAFRCKCVPQMQQSREEAGDIASKGNAADAESFREEAGDIASKSESKEESEVRSWDWVHGNRLGRMPGLGFDKMPGLGFDKHGNR

SEQ ID NO: 23 - protein, 2895 aa, Homo Sapien
HLYEEKHLYEEKDPQRWKTSENEAIKDFSKNLEKELDSLSKVKELDSLSKVKGSELRMINKFLLSLQKDKKLDELPIFKSSEFLKHAGKWMTKHKSLKFTNAKFVKWMTKALSYLYEKSQFEKFVRNNEPYDYKMSLKFTNAKFVRFCFIKLSAIPVSAFCNSETKTITIGSAGKTFSVTGWKTITIGSAGKTFSVTGWKRPLVSSRELDNVTKELDNVTKNILQTLKVLWEQRLLSTLGPRLQTEACRQHLLPGGRCQAMLLRHALQLAQKAHQGQVQRELLGAAGHRMAGQPHSPRKHWEDLRNRDPEEVKGQELEDRRYPHIQAQRRQEEVTVRATSLPNNVARDARPGCLLRDARPGCLLRQVQEQVAQRAQMDTSPAPRAQMDTSPAPRSISDLSLQLKMERWLCSKHVEALQQVGRLQTALQAQNREALIQALDCGKALGSTAAQSLSPKLEEILAAQEVSLKAGQPHSPRELLGAAGHRAGQPHSPRELLGAAGHRWMTKHKILGFSTSAKILGFSTSAKFVKWMTKALSYLYEKSQFEKFVRNNEPYDYKMSLKFTNAKFVRFCFIKLSAIPVSAFCNSETKTITIGSAGKTFSVTGWKTITIGSAGKTFSVTGWKVCGNKIKVCGNKIKVLKSIMNKNEMEKQRNPAFEGVNRMLEAENALKMLEAENALKVVDHAEENKATSFEESERFVQPLLGRKFVQPLLGRKICASEIENRNIVSWVEKKLLLASPPNEREAIFSDCFKVLKSIMNKNEMEKQRMLEAENALKMLEAENALKFVQPLLGRKFVQPLLGRKNIVSWVEKKEAIFSDCFKHLYEEKHLYEEKDPQRWKELKYCKGRDAVGFRGRDAVGFRTSENEAIKITTTEDFKDFSKNLEKELDSLSKVKELDSLSKVKGSELRMINKFLLSLQKDKKLDELPIFKSSEFLKHAGKDPEGKIYYYHVITRWTVNGQLRVGFFTTKHLYEEKHLYEEKDPQRWKTNLSYSRTSENEAIKDFSKNLEKDTRYVSSRELDSLSKVKELDSLSKVKQLQPQPPPKSHYYDSDRGSELRMINKDLRTSSYSKFLLSLQKDKKLDELPIFKSSEFLKHAGKGPMFKGVASSRWTVNGQLRVGFFTTKWTVNGQLRVGFFTTKHLYEEKHLYEEKMTPLPYRMTPLPYRMTPLPYRSRMTPLPYRSRSEVSKLRSEVSKLRQNLNVDKSRAEELKMRGMMAKSLEESQGKSLEESQGKFSENGNQKFSENGNQKTNELLKSKILSLELMKMSFPKAPLKSALKETEIKCQLLEKEKEITVSFLQKQLEEEAKSRQLEEEAKSRQLEDEEGRKIQDLETELEKDENSQLKSEVSKHLYEEKHLYEEKTNLSYSRTSENEAIKDTRYVSSRMFKGVASSRELDSLSKVKELDSLSKVKSHYYDSDRGSELRMINKDLRTSSYSKFLLSLQKDKKLDELPIFKSSEFLKHAGKILNSSEGVKEYLSLSDKKHSQENIKSHHFEDSKLSKSEMHRFHVHFCRMSPEKQHRERQPFLVKSKITVPFLKQMKEELQKQMKEELQKDTLEFEMRDTLEFEMRMSIEMEAMKMSIEMEAMKMSIEMEAMKEKSSLGNELKNITDLKFHSRHLYEEKHLYEEKDPQRWKTNLSYSRGRDAVGFRGRDAVGFRTSENEAIKITTTEDFKDFSKNLEKDTRYVSSRELDSLSKVKELDSLSKVKQLQPQPPPKSHYYDSDRGSELRMINKDLRTSSYSKFLLSLQKDKKLDELPIFKSSEFLKHAGKGPMFKGVASSRDPEGKIYYYHVITRWTVNGQLRVGFFTTKMAQTQGTRVMTVSFHKYHSDDYIKMAQTQGTRRMEIYRPHKMEIYRPHKKMEIYRPHKSIRPDNMSEYSKMTHNLLLNYGLYRSEVSKLRSEVSKLRQNLNVDKSRAEELKMRGMMAKSLEESQGKSLEESQGKFSENGNQKFSENGNQKTNELLKSKILSLELMKMSFPKAPLKSALKETEIKCQLLEKEKEITVSFLQKQLEEEAKSRQLEEEAKSRQLEDEEGRKIQDLETELEKDENSQLKSEVSKHLYEEKHLYEEKDPQRWKTNLSYSRTSENEAIKDFSKNLEKDTRYVSSRELDSLSKVKELDSLSKVKQLQPQPPPKSHYYDSDRGSELRMINKDLRTSSYSKFLLSLQKDKKLDELPIFKSSEFLKHAGKGPMFKGVASSRRASVTERRASVTERGGSTTANNRGGSTTANNRFINTESGRFINTESGRLGSKVEVSKQQQQQPQKAGPQPCYLKAGPQPCYLKTKPSAPAGALKIPKSSALVSRPAILVASKMKRAPWEDPAKRAPWEDPAKGNGTAQSADLRGNGTAQSADLREGLQLYGRRSQSFNNYDKDSELNELRKYPDVASPTLRNSLWSGDDVKTRGGSTTANNRQVPIATAENMKLSSGLPQQKPQLDGRRASVTERRASVTERGGSTTANNRGGSTTANNRFINTESGRFINTESGRLGSKVEVSKQQQQQPQKAGPQPCYLKAGPQPCYLKTKPSAPAGALKIPKSSALVSRPAILVASKMKRAPWEDPAKRAPWEDPAKGNGTAQSADLRGNGTAQSADLREGLQLYGRRSQSFNNYDKDSELNELRKYPDVASPTLRNSLWSGDDVKTRGGSTTANNRQVPIATAENMKLSSGLPQQKPQLDGRNLILQMLRLMPSLSAAGRLMPSLSAAGRQHQSLQITTVMVAVKIISKSEVSKLRSEVSKLRQNLNVDKSRAEELKMRGMMAKSLEESQGKSLEESQGKFSENGNQKFSENGNQKTNELLKSKILSLELMKMSFPKAPLKSALKETEIKCQLLEKEKEITVSFLQKQLEEEAKSRQLEEEAKSRQLEDEEGRKIQDLETELEKDENSQLKSEVSK

SEQ ID NO: 24 - protein, 2375 aa, Homo Sapien
KSSMVALKYKLLESKNLEVEHRLRQQAEIKLRQQAEIKESSLSRQSKNYEALKQRQKGQLEDLEKQKGQLEDLEKETEVLQTDHKQASEYESLISKDLEDRYNQLLKDLEDRYNQLLKSVSGKTPGDFYDRSSSQENLLDEVMKTLVTLREDLVSEKLIEVERNNATLQAEKKTEDTYFISSAGKPTPGTQGKTLLEQNMESKDLFHVEQRTLLEQNMESKDLFHVEQRLMALGPIRLMALGPIRFVTISGQKDFTELQKYSEIQDRYSEIQDRKEVMEHRQQVQFMLKQQVQFMLKLEEEVEACKVVKAQIQEQKNCPISAKLERNCPISAKLERAFSIDIIRHKQISEQLNALNKQISEQLNALNKLLEVWIEFGREKTLLPEDSQKGDLRFVTISGQKQPVYDTTIRTGRQPVYDTTIRTGRARQEQLELTLGRTGSLEEMTQRLRNTISVKAVCDYRLNDALDRLEELKEETYNQLLDKGRLMLLSRDDSGSGSKQTTGEEVLLIQEKLLEVWIEFGRIKELNPEEGEMVEEKHMLEEEGTLDLLGLKKLLPQAEMFEHLSGKQEFIDGILASKFPTTKALIAEHQTFMEEMTRLLSDTVASDPGVLQEQLATTKMSELRVTLDPVQLESSLLREALAGLLVTYPNSQEAENWKEALAGLLVTYPNSQEAENWKEMFSQLADLDDELDGMGAIGRAAQIAGAVRATPAHRARGNMRSCRGNMRSCRLTDFGFGRSCRVLLHMRSCRVLLHMRGHQGGGPAASAPGLRGAPGHPLRPQEVRCENVLLSPDERRLEAGWFQPFLQPRALGQGGARLMALGPIRLMALGPIRFVTISGQKDFTELQKKEVMEHRQQVQFMLKQQVQFMLKLEEEVEACKVVKAQIQEQKNCPISAKLERNCPISAKLERAFSIDIIRHKQISEQLNALNKQISEQLNALNKLLEVWIEFGREKTLLPEDSQKGDLRFVTISGQKQPVYDTTIRTGRQPVYDTTIRTGRARQEQLELTLGRTGSLEEMTQRLRNTISVKAVCDYRLNDALDRLEELKEETYNQLLDKGRLMLLSRDDSGSGSKQTTGEEVLLIQEKLLEVWIEFGRIKELNPEEGEMVEEKHMLEEEGTLDLLGLKKLLPQAEMFEHLSGKQEFIDGILASKFPTTKALIAEHQTFMEEMTRLLSDTVASDPGVLQEQLATTKMSELRVTLDPVQLESSLLREALAGLLVTYPNSQEAENWKEALAGLLVTYPNSQEAENWKEMFSQLADLDDELDGMGAIGRLMALGPIRLMALGPIRFVTISGQKDFTELQKYSEIQDRYSEIQDRKEVMEHRQQVQFMLKQQVQFMLKLEEEVEACKVVKAQIQEQKNCPISAKLERNCPISAKLERAFSIDIIRHKQISEQLNALNKQISEQLNALNKLLEVWIEFGREKTLLPEDSQKGDLRFVTISGQKQPVYDTTIRTGRQPVYDTTIRTGRARQEQLELTLGRGSLEEMTQRLRNTISVKAVCDYRLNDALDRLEELKEETYNQLLDKGRLMLLSRDDSGSGSKQTTGEEVLLIQEKLLEVWIEFGRIKELNPEEGEMVEEKHMLEEEGTLDLLGLKKLLPQAEMFEHLSGKQEFIDGILASKFPTTKALIAEHQTFMEEMTRLLSDTVASDPGVLQEQLATTKMSELRVTLDPVQLESSLLREALAGLLVTYPNSQEAENWKEALAGLLVTYPNSQEAENWKEMFSQLADLDDELDGMGAIGRQLNLLQKRFSNIDKFALTAETKRNFSNMKSLTGYLEKSLTGYLEKAELEHWKIPAWWKKRLELWLRRLELWLRVNDLIEFRSVAMMVPDRSVAMMVPDRTWREMDIRNMKLIESKPKNMKLIESKPKAVLLIGEQGTAKLLSDIFIPALRLLSDIFIPALRVDTLHYAWEKTSIIDFTVTMKLKEASESVAALSKRLLSDIFIPALRLPNPAYTPEISARLVSVLSTIINSTKKNFSNMKMMLAEYQRERWTEQSQEFAAQTKELLSHFNHQNMDALLKVTREAALTLPREAALTLPREILNNHGKDAAPGASKLRDAAPGASKLRGVVDHLLLRGVVDHLLLRQPWHGKAMQRNNEFPVFDEFNNEFPVFDEFGGSPAVTLLISEKASEAGATAPKASARISAPNEFDVMFKLSRDDISTAAGMVKDDVDMLRDYDALRKLEQEYSRRENGQLLRRENGQLLRAHGPEVQAHNKAHGPEVQAHNKKAANEEMEALRLADVEQELSFKKLADVEQELSFKKDDNSATKTLSAAARLQTEVELAESKLKAANEEMEALRQIKVQKGSEPLGISIVSGEKDLNPGVKKDLNPGVKKMSLGQLQSARGTCSGFEPHSWRGVACLGCKGTCSGFEPH

SEQ ID NO: 25 - protein, 2379 aa, Homo Sapien
RQAVQDLRADVVNKALREKMELEMRLKNEEVESERSWCQELEKRIQVLEDQRTRLSALNEALALDKGEHGRLLSLWRQDYITRSAQTSRQDYITRSAQTSRQDLAEQLQGLSSAKRVQALEEVLGDLRELTTQRQLMQERERLQEMLMGLEAKHNVQLRSTLEQVERVNVELQLQGDSAQGQKRQAVQDLRADVVNKALRLKNEEVESERSWCQELEKRIQVLEDQRTRLSALNEALALDKGEHGRLLSLWRQDYITRSAQTSRQDYITRSAQTSRQDLAEQLQGLSSAKRVQALEEVLGDLRELTTQRQLMQERERLQEMLMGLEAKHNVQLRSTLEQVERVNVELQLQGDSAQGQKRQAVQDLRADVVNKALRSWCQELEKRGEHGRLLSLWRVNVELQLQGDSAQGQKLMALGPIRDFTELQKYSEIQDRYSEIQDRKEVMEHRQQVQFMLKQQVQFMLKNHWEELSKKVVKAQIQEQKNCPISAKLERNCPISAKLERQQLEETSEIRLRLEEYEQRQISEQLNALNKQISEQLNALNKLLEVWIEFGRGDLRFVTISGQKALLELVPWRARQPVYDTTIRTGRQPVYDTTIRTGRARQEQLELTLGRTGSLEEMTQRLRNTISVKAVCDYRNTISVKAVCDYRLNDALDRLEELKEETYNQLLDKGRLMLLSRDDSGSGSKQTTGEEVLLIQEKLLEVWIEFGRIKELNPEEGEMVEEKEGLDKLVSDANEQYKHMLEEEGTLDLLGLKKLLPQAEMFEHLSGKALIAEHQTFMEEMTRKALIAEHQTFMEEMTRKIGPQLKELNPEEGEMVEEKLLSDTVASDPGVLQEQLATTKMSELRVTLDPVQLESSLLREIQDKLDQMVFFWEDIKMSELRVTLDPVQLESSLLRNGQALLKQTTGEEVLLIQEKLMALGPIRDFTELQKYSEIQDRYSEIQDRKEVMEHRQQVQFMLKQQVQFMLKNHWEELSKKVVKAQIQEQKNCPISAKLERNCPISAKLERQQLEETSEIRLRLEEYEQRQISEQLNALNKQISEQLNALNKLLEVWIEFGRGDLRFVTISGQKALLELVPWRARQPVYDTTIRTGRQPVYDTTIRTGRARQEQLELTLGRTGSLEEMTQRLRNTISVKAVCDYRNTISVKAVCDYRLNDALDRLEELKEETYNQLLDKGRLMLLSRDDSGSGSKQTTGEEVLLIQEKLLEVWIEFGRIKELNPEEGEMVEEKEGLDKLVSDANEQYKHMLEEEGTLDLLGLKKLLPQAEMFEHLSGKALIAEHQTFMEEMTRKALIAEHQTFMEEMTRKIGPQLKELNPEEGEMVEEKLLSDTVASDPGVLQEQLATTKMSELRVTLDPVQLESSLLREIQDKLDQMVFFWEDIKMSELRVTLDPVQLESSLLRNGQALLKQTTGEEVLLIQEKLMALGPIRDFTELQKKEVMEHRQQVQFMLKQQVQFMLKNHWEELSKKVVKAQIQEQKNCPISAKLERNCPISAKLERQQLEETSEIRLRLEEYEQRQISEQLNALNKQISEQLNALNKLLEVWIEFGRGDLRFVTISGQKALLELVPWRARQPVYDTTIRTGRQPVYDTTIRTGRARQEQLELTLGRTGSLEEMTQRLRNTISVKAVCDYRNTISVKAVCDYRLNDALDRLEELKEETYNQLLDKGRLMLLSRDDSGSGSKQTTGEEVLLIQEKLLEVWIEFGRIKELNPEEGEMVEEKEGLDKLVSDANEQYKHMLEEEGTLDLLGLKKLLPQAEMFEHLSGKALIAEHQTFMEEMTRKALIAEHQTFMEEMTRKIGPQLKELNPEEGEMVEEKLLSDTVASDPGVLQEQLATTKMSELRVTLDPVQLESSLLREIQDKLDQMVFFWEDIKMSELRVTLDPVQLESSLLRNGQALLKQTTGEEVLLIQEKTNFPYVRSDILGHLRSDILGHLRNIFKRPLGSRNIFKRPLGSRQSGVVPFIFQAKSGFPLLKEFVQRTLSGTPEVHSNKRTLSGTPEVHSNKRAAEGIPKLLVLITGGKYPPPGEMGASEVLLGAFSIKMKPLDGSALYTGSALDFVRSAGSRIEDGVLQFLVLLVAGRVDGPASNLKQSGVVPFIFQAKGNRVSPTMKDSLLELSPVERDSLLELSPVERYPGMFIALSKNGKYPGMFIALSKNGKRLYCNVGIGFHLQALPDGRRLYCNVGIGFHLQALPDGRLFEDMVTKMAGASPAVPHERARMAGASPAVPHERARLFEDMVTKLQALRALGVGGAGCGVQGLASLARTTGLSDQQVVCDLDHRAVEALLQAVRMNGEYRGRGGGNFSGKWRTSEQTPQFLLSTKELTEGGEVTNLIPDIATELRTLACMGLAIHQVLTKDLERDAPEKTLACMGLAIHQVL

SEQ ID NO: 26 - protein, 2104 aa, Homo Sapien
RQAVQDLRRQAVQDLREKMELEMRLKNEEVESERIQVLEDQRTRLSALNEALALDKLHMEKADVVNKHFLEMKSATDRQDYITRSAQTSRQDYITRSAQTSRQDLAEQLQGLSSAKELTTQRQLMQERERLQEMLMGLEAKERVSLLETLLQTQKHNVQLRSTLEQVERVNVELQLQGDSAQGQKLSGSLLTCCLRLTVGAQSRRQAVQDLRRQAVQDLRLKNEEVESERIQVLEDQRTRLSALNEALALDKLHMEKADVVNKHFLEMKSATDRQDYITRSAQTSRQDYITRSAQTSRQDLAEQLQGLSSAKELTTQRQLMQERERLQEMLMGLEAKERVSLLETLLQTQKHNVQLRSTLEQVERVNVELQLQGDSAQGQKLSGSLLTCCLRLTVGAQSRRQAVQDLRRQAVQDLRLHMEKADVVNKHFLEMKSATDRLQSSQLQSCRVLKVNVELQLQGDSAQGQKLSGSLLTCCLRLTVGAQSRWHVVSSKLMALGPIRYSEIQDRYSEIQDRQQVQFMLKQQVQFMLKVVKAQIQEQKNCPISAKLERQQLEETSEIRQISEQLNALNKQISEQLNALNKLLEVWIEFGRGDLRFVTISGQKQPVYDTTIRTGRQPVYDTTIRTGRARQEQLELTLGRTGSLEEMTQRLRNTISVKAVCDYRNTISVKAVCDYRLNDALDRLEELKFEQLCLQQQEKEETYNQLLDKGRLMLLSRDDSGSGSKQTTGEEVLLIQEKLLEVWIEFGRIKLLEVWIEFGRIKELNPEEGEMVEEKEIKFLDVLELAEKNDECVLEDNSQRTKEGLDKLVSDANEQYKHMLEEEGTLDLLGLKKLLPQAEMFEHLSGKLDQMVFFWEDIKARALIAEHQTFMEEMTRKALIAEHQTFMEEMTRKDENYYQLEELAFRVMRLLSDTVASDPGVLQEQLATTKMSELRVTLDPVQLESSLLRSTVMVRVGGGWMALDEFLVKFSQQYSTIVKDYELQLMTYKAEFFADVVPAVRDILFPYIEENVKMKAEFFADVVPAVRQLQGHMWRAAFTAGRLLFGHSTEGDILELVDGHFDTKIGHKVYIYSSGSVEAQKLLFGHSTEGDILELVDGHFDTKSVAYMPYAEVKSVAYMPYAEVKSVAYMPYAEVKRSSTSPCGTSKSPNRSSTSPCGTSKSPNRRALEQEAQMHNTAARYSVPPVLQPAPHQVITNLPEWHVVSSKLMALGPIRYSEIQDRYSEIQDRQQVQFMLKQQVQFMLKVVKAQIQEQKNCPISAKLERQQLEETSEIRQISEQLNALNKQISEQLNALNKLLEVWIEFGRGDLRFVTISGQKQPVYDTTIRTGRQPVYDTTIRTGRARQEQLELTLGRTGSLEEMTQRLRNTISVKAVCDYRNTISVKAVCDYRLNDALDRLEELKFEQLCLQQQEKEETYNQLLDKGRLMLLSRDDSGSGSKQTTGEEVLLIQEKLLEVWIEFGRIKLLEVWIEFGRIKELNPEEGEMVEEKEIKFLDVLELAEKNDECVLEDNSQRTKEGLDKLVSDANEQYKHMLEEEGTLDLLGLKKLLPQAEMFEHLSGKLDQMVFFWEDIKARALIAEHQTFMEEMTRKALIAEHQTFMEEMTRKDENYYQLEELAFRVMRLLSDTVASDPGVLQEQLATTKMSELRVTLDPVQLESSLLRSTVMVRVGGGWMALDEFLVKFSQQYSTIVKDYELQLMTYKIAEIFMRHLFCPDLLRHLFCPDLLRDKVAFITGGGSGIGFRIAEIFMRAEFFADVVPAVRDILFPYIEENVKMKAEFFADVVPAVRQLQGHMWRAAFTAGRLLFGHSTEGDILELVDGHFDTKIGHKVYIYSSGSVEAQKLLFGHSTEGDILELVDGHFDTKKLPASEGVGKKLPASEGVGKNVILMAHDGKFYMVSYYERFYMVSYYERWQDRCLEVRGPITAVAFAPDGRSLAALKNMAHHKGLQECFPAICRYSHNSLMVQAIKYSHNSLMVQAIKLPASCLPASDSFRVIIWTENGQSYIYKHTCKALTFLLLQPPSPKEHLLDDEEEDEEIMRQRYDQRYLISGGVDFSVIIWDIFSGEMKQGWSQLAAMHCVMLPDLLGLDKFRPPLLEMLAR

SEQ ID NO: 27 - protein, 2591 aa, Homo Sapien
KLPASEGVGKFYMVSYYERWQDRCLEVRWQDRCLEVRGPITAVAFAPDGRSLAALKNMAHHKSLAALKNMAHHKGLQECFPAICRYSHNSLMVQAIKYSHNSLMVQAIKLPASCLPASDSFRVIIWTENGQSYIYKEHLLDDEEEDEEIMRHTCKALTFLLLQPPSPKHALSLIATARPPAFITTIAKEHLLDDEEEDEEIMRQREHLLDDEEEDEEIMRQRCQTIHGHKGPITAVAFAPDGRYDQRYLISGGVDFSVIIWDIFSGEMKKLPASEGVGKFYMVSYYERWQDRCLEVRWQDRCLEVRGPITAVAFAPDGRSLAALKNMAHHKSLAALKNMAHHKGLQECFPAICRYSHNSLMVQAIKYSHNSLMVQAIKLPASCLPASDSFRVIIWTENGQSYIYKEHLLDDEEEDEEIMRHTCKALTFLLLQPPSPKHALSLIATARPPAFITTIAKEHLLDDEEEDEEIMRQREHLLDDEEEDEEIMRQRCQTIHGHKGPITAVAFAPDGRYDQRYLISGGVDFSVIIWDIFSGEMKEVQLVESGAEVKSDDTAVYYCARSDDTAVYYCARASGYTFTGYYMHWVRVTMTRDTTISTAYMELSRIAAAGDAFDIWGQGTMVTVSSLMALGPIRLMALGPIRYSEIQDRQQVQFMLKQQVQFMLKVVKAQIQEQKNCPISAKLERNCPISAKLERMPPLIPAEVDKQQLEETSEIRQISEQLNALNKLLEVWIEFGRLLEVWIEFGREKTLLPEDSQKGDLRFVTISGQKGDLRFVTISGQKQPVYDTTIRTGRQPVYDTTIRTGRARQEQLELTLGRTGSLEEMTQRLRNTISVKAVCDYRFEQLCLQQQEKEETYNQLLDKGRLMLLSRDDSGSGSKLLEVWIEFGRIKELNPEEGEMVEEKEIKFLDVLELAEKHMLEEEGTLDLLGLKQEFIDGILASKFPTTKALIAEHQTFMEEMTRALIAEHQTFMEEMTRKALIAEHQTFMEEMTRKWLKETEGSIPPTETSMSAKLLSDTVASDPGVLQEQLATTKLLSDTVASDPGVLQEQLATTKEIQDKLDQMVFFWEDIKEALAGLLVTYPNSQEAENWKEMFSQLADLDDELDGMGAIGRFSQQYSTIVKDYELQLMTYKWADHEVRAMESTATAAVAAELVSADKMAMESTATAAVAAELVSADKAMESTATAAVAAELVSADKMSGRLMALGPIRLMALGPIRYSEIQDRQQVQFMLKQQVQFMLKVVKAQIQEQKNCPISAKLERNCPISAKLERMPPLIPAEVDKQQLEETSEIRQISEQLNALNKLLEVWIEFGRLLEVWIEFGREKTLLPEDSQKGDLRFVTISGQKGDLRFVTISGQKQPVYDTTIRTGRQPVYDTTIRTGRARQEQLELTLGRTGSLEEMTQRLRNTISVKAVCDYRFEQLCLQQQEKEETYNQLLDKGRLMLLSRDDSGSGSKLLEVWIEFGRIKELNPEEGEMVEEKEIKFLDVLELAEKHMLEEEGTLDLLGLKQEFIDGILASKFPTTKALIAEHQTFMEEMTRALIAEHQTFMEEMTRKALIAEHQTFMEEMTRKWLKETEGSIPPTETSMSAKLLSDTVASDPGVLQEQLATTKLLSDTVASDPGVLQEQLATTKEIQDKLDQMVFFWEDIKEALAGLLVTYPNSQEAENWKEMFSQLADLDDELDGMGAIGRFSQQYSTIVKDYELQLMTYKLMALGPIRLMALGPIRQQVQFMLKQQVQFMLKVVKAQIQEQKNCPISAKLERNCPISAKLERMPPLIPAEVDKQQLEETSEIRQISEQLNALNKLLEVWIEFGRLLEVWIEFGREKTLLPEDSQKGDLRFVTISGQKGDLRFVTISGQKQPVYDTTIRTGRQPVYDTTIRTGRARQEQLELTLGRTGSLEEMTQRLRNTISVKAVCDYRFEQLCLQQQEKEETYNQLLDKGRLMLLSRDDSGSGSKLLEVWIEFGRIKELNPEEGEMVEEKEIKFLDVLELAEKHMLEEEGTLDLLGLKQEFIDGILASKFPTTKALIAEHQTFMEEMTRALIAEHQTFMEEMTRKALIAEHQTFMEEMTRKWLKETEGSIPPTETSMSAKLLSDTVASDPGVLQEQLATTKLLSDTVASDPGVLQEQLATTKEIQDKLDQMVFFWEDIKEALAGLLVTYPNSQEAENWKEMFSQLADLDDELDGMGAIGRFSQQYSTIVKDYELQLMTYKSYAEELAKISYSLFTALRIVMNMNKSTRDKLDQVSSEIKDKLDQVSSEIKMININILSVCKMININILSVCKGVFVQSVLPYFVATKLAKMININILSVCKMTQLVLPGMVERMININILSVCKMTQLVLPGMVERYEDEINKEDLARLLRGFSSGSAVVSGGSRRSTSSFSCLSRHGGGGGGFGGGGFGSRHGGGGGGFGGGGFGSRGSSSGGGYSSGSSSYGSGGRQCKNVQDAIADAEQRSISISVAGGGGGFGAAGGFGGRDYQELMNVKLALDVEIATYRNPGSLRGRLETHPCRGSIGQSAIPRSPCPIRSPLPARASAPWASLSTRADSGLRMSPLETNKGSIGQSAIPRATSASLPQETPFALSVVWAPRR

SEQ ID NO: 28 - protein, 671 aa, Homo Sapien
LSQRFPKYLYEIARYLYEIARFQNALLVRKYLYEIARLDELRDEGKCCTESLVNRLVNEVTEFAKLVNEVTEFAKFKDLGEENFKAVMDDFAAFVEKAVMDDFAAFVEKAVMDDFAAFVEKAAFTECCQAADKETYGEMADCCAKYICENQDSISSKTCVADESAENCDKVPQVSTPTLVEVSRLKECCEKPLLEKCCAAADPHECYAKDVFLGMFLYEYARADDKETCFAEEGQKKVPQVSTPTLVEVSRKVPQVSTPTLVEVSRQNCELFEQLGEYKQEPERNECFLQHKRPCFSALEVDETYVPKRPCFSALEVDETYVPKSLHTLFGDKLCTVATLRNECFLQHKDDNPNLPRVFDEFKPLVEEPQNLIKVFDEFKPLVEEPQNLIKVHTECCHGDLLECADDRAAFTECCQAADKAACLLPKEFNAETFTFHADICTLSEKEFNAETFTFHADICTLSEKEREFNAETFTFHADICTLSEKERVHTECCHGDLLECADDRADLAKVHTECCHGDLLECADDRADLAKQNCELFEQLGEYKFQNALLVRLVRPEVDVMCTAFHDNEETFLKLVRPEVDVMCTAFHDNEETFLKKLVRPEVDVMCTAFHDNEETFLKKLVRPEVDVMCTAFHDNEETFLKKSHCIAEVENDEMPADLPSLAADFVESK

SEQ ID NO: 29 - protein, 672 aa, Homo Sapien
LSQRFPKYLYEIARYLYEIARFQNALLVRAFKAWAVARKYLYEIARLDELRDEGKYLYEIARRCCTESLVNRLVNEVTEFAKLVNEVTEFAKFKDLGEENFKHPDYSVVLLLRAVMDDFAAFVEKAVMDDFAAFVEKAVMDDFAAFVEKAAFTECCQAADKETYGEMADCCAKYICENQDSISSKETYGEMADCCAKRHPDYSVVLLLRRHPDYSVVLLLRVPQVSTPTLVEVSRLKECCEKPLLEKCCAAADPHECYAKCCAAADPHECYAKDVFLGMFLYEYARADDKETCFAEEGQKKVPQVSTPTLVEVSRKVPQVSTPTLVEVSRQNCELFEQLGEYKYKAAFTECCQAADKQEPERNECFLQHKRPCFSALEVDETYVPKRPCFSALEVDETYVPKSLHTLFGDKLCTVATLRNECFLQHKDDNPNLPRVFDEFKPLVEEPQNLIKVFDEFKPLVEEPQNLIKVHTECCHGDLLECADDRAAFTECCQAADKAACLLPKEFNAETFTFHADICTLSEKEFNAETFTFHADICTLSEKERVHTECCHGDLLECADDRADLAKVHTECCHGDLLECADDRADLAKQNCELFEQLGEYKFQNALLVRLVRPEVDVMCTAFHDNEETFLKLVRPEVDVMCTAFHDNEETFLKKLVRPEVDVMCTAFHDNE

SEQ ID NO: 30 - protein, 420 aa, Homo Sapien
NWIQYKVGPEADKYRVGPEADKYRVELEDWNGRVELEDWNGRTSTADYAMFKTSTADYAMFKDNCCILDERDNCCILDERQSGLYFIKPLKYEASILTHDSSIRYEASILTHDSSIRYLQEIYNSNNQKYLQEIYNSNNQKIHLISTQSAIPYALRIHLISTQSAIPYALRASTPNGYDNGIIWATWKASTPNGYDNGIIWATWKCHAGHLNGVYYQGGTYSKEGFGHLSPTGTTEFWLGNEKEGFGHLSPTGTTEFWLGNEKVELEDWNGRTSTADYAMFKFGSYCPTTCGIADFLSTYQTKAIQLTYNPDESSKPNMIDAATLKAIQLTYNPDESSKPNMIDAATLKAIQLTYNPDESSKPNMIDAATLKVAQLEAQCQEPCKDTVQIHDITGKVAQLEAQCQEPCKDTVQIHDITGK

SEQ ID NO: 31 - protein, 439 aa, Homo Sapien
NWIQYKVGPEADKYRVGPEADKYRVELEDWNGRVELEDWNGRTSTADYAMFKTSTADYAMFKDNCCILDERDNCCILDERQSGLYFIKPLKYEASILTHDSSIRYEASILTHDSSIRYLQEIYNSNNQKYLQEIYNSNNQKIHLISTQSAIPYALRIHLISTQSAIPYALRASTPNGYDNGIIWATWKCHAGHLNGVYYQGGTYSKEGFGHLSPTGTTEFWLGNEKEGFGHLSPTGTTEFWLGNEKVELEDWNGRTSTADYAMFKMLEEIMKYEASILTHDSSIRFGSYCPTTCGIADFLSTYQTKAIQLTYNPDESSKPNMIDAATLKAIQLTYNPDESSKPNMIDAATLKAIQLTYNPDESSKPNMIDAATLKANQQFLVYCEIDGSGNGWTVFQKVAQLEAQCQEPCKDTVQIHDITGKVAQLEAQCQEPCKDTVQ

SEQ ID NO: 32 - protein, 274 aa, Homo Sapien
TLLEGEESRAQYEDIAQKAQYEDIAQKTNAENEFVTIKNSKIEISELNRSLDLDSIIAEVKNMQDMVEDYRSKAEAESLYQSKLNDLEDALQQAKLNDLEDALQQAKTNAENEFVTIKKTNAENEFVTIKKLLRDYQELMNTKSGGGFSSGSAGIINYQRLDSELKNMQDMVEDYRAEAESLYQSKYEELQITAGRGSYGSGGSSYGSGGGSYGSGGGGGGHGSYGSGSSSGGYRGSYGSGGSSYGSGGGSYGSGGGGGGHGSYGSGSSSGGYR

SEQ ID NO: 33 - protein, 485 aa, Homo Sapien
IDVHLVPDRIIYKENEREFDHNSNIRRPYFPVAVGKCLHPCVISRLSYTCEGGFRLSYTCEGGFRSSQESYAHGTKHGGLYHENMRTGDEITYQCRTGDEITYQCRCTSTGWIPAPRWQSIPLCVEKDGWSAQPTCIKSCDIPVFMNARSCDIPVFMNARTGESVEFVCKRSCDIPVFMNARSCDIPVFMNAREIMENYNIALRSSNLIILEEHLKSIDVACHPGYALPKAGEQVTYTCATYYKEIMENYNIALRWTAKEIMENYNIALRWTAKSCDNPYIPNGDYSPLREIMENYNIALRWTAKEQVQSCGPPPELLNGNVKDTSCVNPPTVQNAYIVSRIPCSQPPQIEHGTINSSRCYFPYLENGYNQNYGRECDTDGWTNDIPICEVVKAVYTCNEGYQLLGEINYRIVSSAMEPDREYHFGQAVRIVSSAMEPDREYHFGQAVRTKEEYGHSEVVEYYCNPRTKEEYGHSEVVEYYCNPR

SEQ ID NO: 34 - protein, 90 aa, Homo Sapien
CLVGAQCVLSRCSAGAQFVFCRSAGAACTQQALSRCTVCTQQALSRCSAGAQFVFCRRQAHGRCSAGAQFVFCRQAHGRCSAGAQFVFCR

SEQ ID NO: 35 - protein, 305 aa, Homo Sapien
VSVFVPPRDGFFGNPRDGFFGNPRQIQVSWLRQIQVSWLRLICQATGFSPRLICQATGFSPRNVPLPVIAELPPKSKLICQATGFSPRYVTSAPMPEPQAPGRYVTSAPMPEPQAPGRYVTSAPMPEPQAPGRYVTSAPMPEPQAPGRESDWLSQSMFTCRESDWLSQSMFTCRESDWLSQSMFTCRESDWLSQSMFTCRFTCTVTHTDLPSPLKGVALHRPDVYLLPPARGVALHRPDVYLLPPARVSVFVPPRDGFFGNPREGKQVGSGVTTDQVQAEAKGQPLSPEKYVTSAPMPEPQAPGR

SEQ ID NO: 36 - protein, 591 aa, Homo Sapien
SILENLRGSWYSMRQDGSVDFGRIRPFFPQQIRPFFPQQEDGGGWWYNREDGGGWWYNRDNDGWLTSDPRAHYGGFTVQNEANKHGTDDGVVWMNWKHGTDDGVVWMNWKLESDVSAQMEYCRLESDVSAQMEYCRTPCTVSCNIPVVSGKYYWGGQYTWDMAKYYWGGQYTWDMAKQCSKEDGGGWWYNRQCSKEDGGGWWYNRNYCGLPGEYWLGNDKEEAPSLRPAPPPISGGGYREEAPSLRPAPPPISGGGYRIQKLESDVSAQMEYCRIQKLESDVSAQMEYCRREEAPSLRPAPPPISGGGYRHQLYIDETVNSNIPTNLRVYCDMNTENGGWTVIQNRVYCDMNTENGGWTVIQNRVYCDMNTENGGWTVIQNRGGETSEMYLIQPDSSVKPYRGGETSEMYLIQPDSSVKPYRGGETSEMYLIQPDSSVKPYRAHYGGFTVQNEANKYQISVNKKGGETSEMYLIQPDSSVKPYRKGGETSEMYLIQPDSSVKPYRKGGETSEMYLIQPDSSVKPYRNYCGLPGEYWLGNDKISQLTRTPCTVSCNIPVVSGKECEEIIRTPCTVSCNIPVVSGKECEEIIR

SEQ ID NO: 37 - protein, 391 aa, Homo Sapien
AKPALEDLRLSPLGEEMRQKLHELQEKATEHLSTLSEKQGLLPVLESFKDLATVYVDVLKVQPYLDDFQKWQEEMELYRWQEEMELYRWQEEMELYRTHLAPYSDELRTHLAPYSDELRLSPLGEEMRDRLSPLGEEMRDRETEGLRQEMSKVQPYLDDFQKKVQPYLDDFQKKVSFLSALEEYTKDYVSQFEGSALGKDYVSQFEGSALGKKWQEEMELYRKWQEEMELYRAKVQPYLDDFQKVKDLATVYVDVLKVEPLRAELQEGARVEPLRAELQEGARWQEEMELYRQKLLDNWDSVTSTFSKDLATVYVDVLKDSGRDSGRDYVSQFEGSALGKDSGRDYVSQFEGSALGKEQLGPVTQEFWDNLEKLREQLGPVTQEFWDNLEK

SEQ ID NO: 38 - protein, 714 aa, Homo Sapien
VVLVAVDKIEGDHGARIWDVVEKEALKLEEKISLPESLKRVLLDGVQNPRFYYIYNEKYYTYLIMNKYYTYLIMNKKVLLDGVQNPRKVLLDGVQNPREVVADSVWVDVKTIYTPGSTVLYRTIYTPGSTVLYRKQELSEAEQATRIPIEDGSGEVVLSRIPIEDGSGEVVLSRIRYYTYLIMNKLVAYYTLIGASGQRLVAYYTLIGASGQRIPIEDGSGEVVLSRKRIPIEDGSGEVVLSRTVMVNIENPEGIPVKSGIPIVTSPYQIHFTKSGIPIVTSPYQIHFTKVLLDGVQNPRAEDLVGKVHQYFNVELIQPGAVKVEGTAFVIFGIQDGEQRTELRPGETLNVNFLLRTELRPGETLNVNFLLREYVLPSFEVIVEPTEKLSINTHPSQKPLSITVRLSINTHPSQKPLSITVRSYTVAIAGYALAQMGRLKSGQSEDRQPVPGQQMTLKSGQSEDRQPVPGQQMTLKSGQSEDRQPVPGQQMTLKAYYENSPQQVFSTEFEVKVPVAVQGEDTVQSLTQGDGVAKEVVADSVWVDVKDSCVGSLVVKEPGQDLVVLPLSITTDFIPSFRDYAGVFSDAGLTFTSSSGQQTAQRTMQALPYSTVGNSNNYLHLSVLRTMQALPYSTVGNSNNYLHLSVLRLESEETMVLEAHDAQGDVPVTVTVHDFPGKKADIGCTPGSGKDYAGVFSDAGLTFTSSSGQQTAQR

SEQ ID NO: 39 - protein, 695 aa, Homo Sapiens
LSQRFPKYLYEIARYLYEIARFQNALLVRKYLYEIARLDELRDEGKCCTESLVNRLVNEVTEFAKLVNEVTEFAKFKDLGEENFKHPDYSVVLLLRAVMDDFAAFVEKAVMDDFAAFVEKAVMDDFAAFVEKAAFTECCQAADKETYGEMADCCAKYICENQDSISSKRHPDYSVVLLLRVPQVSTPTLVEVSRLKECCEKPLLEKCCAAADPHECYAKDVFLGMFLYEYARADDKETCFAEEGQKKVPQVSTPTLVEVSRKVPQVSTPTLVEVSRQNCELFEQLGEYKYKAAFTECCQAADKQEPERNECFLQHKRPCFSALEVDETYVPKRPCFSALEVDETYVPKSLHTLFGDKLCTVATLRNECFLQHKDDNPNLPRVFDEFKPLVEEPQNLIKVFDEFKPLVEEPQNLIKVHTECCHGDLLECADDRAAFTECCQAADKAACLLPKEFNAETFTFHADICTLSEKEFNAETFTFHADICTLSEKEREFNAETFTFHADICTLSEKERVHTECCHGDLLECADDRADLAKVHTECCHGDLLECADDRADLAKQNCELFEQLGEYKFQNALLVRLVRPEVDVMCTAFHDNEETFLKLVRPEVDVMCTAFHDNEETFLKKLVRPEVDVMCTAFHDNEETFLKKLVRPEVDVMCTAFHDNEETFLKKSHCIAEVENDEMPADLPSLAADFVESK

SEQ ID NO: 40 - protein, 412 aa, Homo Sapiens
SILENLRGSWYSMRQDGSVDFGRIRPFFPQQIRPFFPQQEDGGGWWYNREDGGGWWYNRHGTDDGVVWMNWKLESDVSAQMEYCRLESDVSAQMEYCRYYWGGQYTWDMAKQCSKEDGGGWWYNREEAPSLRPAPPPISGGGYREEAPSLRPAPPPISGGGYRIQKLESDVSAQMEYCRIQKLESDVSAQMEYCRREEAPSLRPAPPPISGGGYRHQLYIDETVNSNIPTNLRVYCDMNTENGGWTVIQNRVYCDMNTENGGWTVIQNRVYCDMNTENGGWTVIQNRGGETSEMYLIQPDSSVKPYRGGETSEMYLIQPDSSVKPYRAHYGGFTVQNEANKYQISVNKKGGETSEMYLIQPDSSVKPYRKGGETSEMYLIQPDSSVKPYRTPCTVSCNIPVVSGKECEEIIR

SEQ ID NO: 41 - protein, 250 aa, Homo Sapiens
ALPAPIEKNQVSLTCLVKGPSVFPLAPSSKEPQVYTLPPSRAEDTALYYCAKNSLYLQMNSLRFNWYVDGVEVHNAKFNWYVDGVEVHNAKGQPREPQVYTLPPSRGQPREPQVYTLPPSRDELTKNQVSLTCLVKEPQVYTLPPSRDELTKEPQVYTLPPSRDELTKTPEVTCVVVDVSHEDPEVKTPEVTCVVVDVSHEDPEVKGFYPSDIAVEWESNGQPENNYKGFYPSDIAVEWESNGQPENNYK

SEQ ID NO: 42 - protein, 266 aa, Homo Sapiens
SILENLRGSWYSMRQDGSVDFGRQDGSVDFGRIRPFFPQQIRPFFPQQEDGGGWWYNREDGGGWWYNRQGFGNVATNTDGKAHYGGFTVQNEANKLESDVSAQMEYCRLESDVSAQMEYCRQCSKEDGGGWWYNRIQKLESDVSAQMEYCRHQLYIDETVNSNIPTNLRVYCDMNTENGGWTVIQNRVYCDMNTENGGWTVIQNRGGETSEMYLIQPDSSVKPYRGGETSEMYLIQPDSSVKPYRKGGETSEMYLIQPDSSVKPYR

SEQ ID NO: 43 - protein, 405 aa, Homo Sapiens
VGPEADKYRVGPEADKYRVELEDWNGRVELEDWNGRTSTADYAMFKTSTADYAMFKDNCCILDERDNCCILDERQSGLYFIKPLKYEASILTHDSSIRYEASILTHDSSIRYLQEIYNSNNQKYLQEIYNSNNQKLTIGEGQQHHLGGAKIHLISTQSAIPYALRIHLISTQSAIPYALRASTPNGYDNGIIWATWKASTPNGYDNGIIWATWKCHAGHLNGVYYQGGTYSKEGFGHLSPTGTTEFWLGNEKEGFGHLSPTGTTEFWLGNEKVELEDWNGRTSTADYAMFKIIPFNRLTIGEGQQHHLGGAKAIQLTYNPDESSKPNMIDAATLKAIQLTYNPDESSKPNMIDAATLKAIQLTYNPDESSKPNMIDAATLKVAQLEAQCQEPCKDTVQIHDITGK

SEQ ID NO: 44 - protein, 592 aa, Homo Sapiens
SCHTAVGRASYLDCIRASYLDCIRKSCHTAVGRKASYLDCIRKASYLDCIRDSGFQMNQLRDSGFQMNQLRCQSFRDHMKDSGFQMNQLRDSGFQMNQLRCQSFRDHMKSASDLTWDNLKSASDLTWDNLKHSTIFENLANKEFQLFSSPHGKWCAVSEHEATKKDSGFQMNQLRDSAHGFLKVPPRKDSGFQMNQLRKSASDLTWDNLKCLKDGAGDVAFVKSVIPSDGPSVACVKMYLGYEYVTAIRSKEFQLFSSPHGKMYLGYEYVTAIRMYLGYEYVTAIRLKCDEWSVNSVGKDQYELLCLDNTRSVIPSDGPSVACVKKEDPQTFYYAVAVVKDCHLAQVPSHTVVARIECVSAETTEDCIAKEDPQTFYYAVAVVKKEGTCPEAPTDECKPVKADRDQYELLCLDNTRADRDQYELLCLDNTRMDAKMYLGYEYVTAIRSAGWNIPIGLLYCDLPEPRIMNGEADAMSLDGGFVYIAGKIMNGEADAMSLDGGFVYIAGKNLREGTCPEAPTDECKPVKDGAGDVAFVKHSTIFENLANKKPVDEYKDCHLAQVPSHTVVARKPVDEYKDCHLAQVPSHTVVAR

SEQ ID NO: 45 - protein, 271 aa, Homo Sapiens
IIAPPERKAGFAGDDAPRIKIIAPPERGYSFVTTAERGYSFVTTAERHQGVMVGMGQKHQGVMVGMGQKAVFPSIVGRPRAVFPSIVGRPRHQGVMVGMGQKDSYVGDEAQSKRQEYDEAGPSIVHRQEYDEAGPSIVHRLDLAGRDLTDYLMKGYSFVTTAEREIVRLDLAGRDLTDYLMKSYELPDGQVITIGNERSYELPDGQVITIGNERVAPEEHPTLLTEAPLNPKVAPEEHPTLLTEAPLNPKDLYANNVLSGGTTMYPGIADR

SEQ ID NO: 46 - protein, 333 aa, Homo Sapiens
QKVEPLRAELQEGARAKPALEDLRAKPALEDLRLSPLGEEMRQKLHELQEKATEHLSTLSEKVQPYLDDFQKWQEEMELYRWQEEMELYRTHLAPYSDELRTHLAPYSDELRETEGLRQEMSKLSPLGEEMRDRLSPLGEEMRDRETEGLRQEMSKVQPYLDDFQKKVQPYLDDFQKKDYVSQFEGSALGKKWQEEMELYRVKDLATVYVDVLKVEPLRAELQEGARVEPLRAELQEGARTHLAPYSDELRQRLLDNWDSVTSTFSKDLATVYVDVLKDSGRDSGRDYVSQFEGSALGKDSGRDYVSQFEGSALGKLREQLGPVTQEFWDNLE

SEQ ID NO: 47 - protein, 105 aa, Homo Sapiens
IIAPPERKAGFAGDDAPRIKIIAPPERGYSFVTTAERGYSFVTTAERAVFPSIVGRPRAVFPSIVGRPRHQGVMVGMGQKDSYVGDEAQSKRQEYDEAGPSIVHR

SEQ ID NO: 48 - protein, 219 aa, Homo Sapiens
ALPAPIEKNQVSLTCLVKEPQVYTLPPSREPQVYTLPPSRFNWYVDGVEVHNAKFNWYVDGVEVHNAKGQPREPQVYTLPPSREPQVYTLPPSRDELTKEPQVYTLPPSRDELTKTPEVTCVVVDVSHEDPEVKTPEVTCVVVDVSHEDPEVKGRFTISGDISTNTLYLQMHSLRGFYPSDIAVEWESNGQPENNYKGFYPSDIAVEWESNGQPENNYK

SEQ ID NO: 49 - protein, 378 aa, Homo Sapiens
IIAPPERKAGFAGDDAPRAGFAGDDAPRDLTDYLMKIKIIAPPERGYSFTTTAERGYSFTTTAERHQGVMVGMGQKHQGVMVGMGQKAVFPSIVGRPRAVFPSIVGRPRHQGVMVGMGQKDSYVGDEAQSKRIWHHTFYNELRQEYDESGPSIVHRQEYDESGPSIVHRLDLAGRDLTDYLMKGYSFTTTAEREIVRLDLAGRDLTDYLMKQEYDESGPSIVHRKSYELPDGQVITIGNERSYELPDGQVITIGNERVAPEEHPVLLTEAPLNPKVAPEEHPVLLTEAPLNPKDLYANTVLSGGTTMYPGIADRDLYANTVLSGGTTMYPGIADRDLYANTVLSGGTTMYPGIADRKDLYANTVLSGGTTMYPGIADR

SEQ ID NO: 50 - protein, 264 aa, Homo Sapiens
ALDLINKRHSHESQDLRDGYLFQLLRDGYLFQLLRHPNVFGFCRHPNVFGFCRRDGYLFQLLRRPSEIVIGQCKRPSEIVIGQCKYWNDCEPPDSRGGEGTGYFVDFSVRGGEGTGYFVDFSVRYKEENDDFASFRYKEENDDFASFRKYWNDCEPPDSRKYWNDCEPPDSRDSPVLIDFFEDTERDSPVLIDFFEDTERVRGGEGTGYFVDFSVRVRGGEGTGYFVDFSVRADLFYDVEALDLESPKDSPVLIDFFEDTERYR

SEQ ID NO: 51 - protein, 280 aa, Homo Sapiens
ALDLINKRHSHESQDLRDGYLFQLLRDGYLFQLLRHPNVFGFCRHPNVFGFCRRDGYLFQLLRRPSEIVIGQCKRPSEIVIGQCKYWNDCEPPDSRGGEGTGYFVDFSVRGGEGTGYFVDFSVRYKEENDDFASFRYKEENDDFASFRKYWNDCEPPDSRKYWNDCEPPDSRDSPVLIDFFEDTERDSPVLIDFFEDTERVRGGEGTGYFVDFSVRVRGGEGTGYFVDFSVRADLFYDVEALDLESPKADLFYDVEALDLESPKDSPVLIDFFEDTERYR

SEQ ID NO: 52 - protein, 323 aa, Homo Sapiens
YLYEIARYLYEIARLCTVATLRDDNPNLPRKYLYEIARYLYEIARRLVNEVTEFAKLVNEVTEFAKFKDLGEENFKFKDLGEENFKETYGEMADCCAKETYGEMADCCAKETYGEMADCCAKTCVADESAENCDKQEPERNECFLQHKQEPERNECFLQHKSLHTLFGDKLCTVATLRNECFLQHKDDNPNLPRNECFLQHKDDNPNLPRTCVADESAENCDKSLHTLFGDKLVRPEVDVMCTAFHDNEETFLKLVRPEVDVMCTAFHDNEETFLKKLVRPEVDVMCTAFHDNEETFLKKLVRPEVDVMCTAFHDNEETFLKK

1. KH1 (new found protein from Cryoprecipitate)—Sequence: SEQ ID. NO. KH1.

2. KH2 (new found protein from Cryoprecipitate)—Sequence SEQ ID. NO. KH2.

3. KH3 (new found protein from Fraction III)—Sequence: SEQ ID. No. KH3.

4. KH4 (new found protein from fraction III)—Sequence: SEQ ID. No. KH4.

5. KH5 (new found protein from fraction III)—Sequence SEQ ID. NO. KH5.

6. KH6 new found protein from fraction III)—Sequence SEQ ID. NO. KH6.

7. KH7 (new found protein from fraction III)—Sequence SEQ ID. NO. KH7.

8. KH8 (new found protein from fraction III)—Sequence SEQ ID. NO. KH8.

9. KH9 (new found protein from fraction III)—Sequence SEQ ID. NO. KH9.

10. KH10 (new found protein from fraction III)—Sequence SEQ ID. NO. KH10.

11. KH11 (new found protein from Prothrombin Complex Concentrate)—Sequence SEQ ID. NO. KH11.

12. KH12 (new found protein from Prothrombin Complex Concentrate)—Sequence SEQ ID. NO. KH12.

13. KH13 (new found protein from Prothrombin Complex Concentrate)—Sequence SEQ ID. NO. KH13.

14. KH14 (new found protein from Prothrombin Complex Concentrate)—Sequence SEQ ID. NO. KH14.

15. KH15 (new found protein from Prothrombin Complex Concentrate)—Sequence SEQ ID. NO. KH15.

16. KH16 (new found protein from Prothrombin Complex Concentrate)—Sequence SEQ ID. NO. KH16.

17. KH17 (new found protein from Prothrombin Complex Concentrate)—Sequence SEQ ID. NO. KH17.

18. KH18 (new found protein from Prothrombin Complex Concentrate)—Sequence SEQ ID. NO. KH18.

19. KH19 (new found protein from AFCC)—Sequence SEQ ID. NO. KH19.

20. KH20 (new found protein from AFCC)—Sequence SEQ ID. NO. KH20.

21. KH 21 (new found protein from fraction IV)—Sequence SEQ ID. NO. KH21.

22. KH 22 (new found protein from fraction IV)—Sequence SEQ ID. NO. KH22.

23. KH 23 (new found protein from fraction IV)—Sequence SEQ ID. NO. KH23.

24. KH 24 (new found protein from AFOD)—Sequence SEQ ID. NO. KH24

25. KH 25 (new found protein from AFOD)—Sequence SEQ ID. NO. KH25.

26. KH 26 (new found protein from AFOD)—Sequence SEQ ID. NO. KH26.

27. KH 27 (new found protein from AFOD)—Sequence SEQ ID NO. KH27.

28. KH28 (New Found protein in HemoRAAS®)—Sequence SEQ ID NO. KH28.

29. KH29 (New Found protein in HemoRAAS®)—Sequence SEQ ID NO. KH29.

30. KH30 (New Found protein in FibroRAAS®)—Sequence SEQ ID NO. KH30.

31. KH31 (New Found protein in FibroRAAS®)—Sequence: SEQ ID NO. KH31.

32. KH32 (New Found protein in FibroRAAS®)—Sequence: SEQ ID NO. KH32.

33. KH33 (New Found protein in GammaRAAS®) Sequence: SEQ ID NO. KH33.

34. KH34 (New Found protein in GammaRAAS®)—Sequence: SEQ ID NO. KH34.

35. KH35 (New Found protein in GammaRAAS®)—Sequence: SEQ ID NO. KH35.

36. KH36 (New Found protein in GammaRAAS®)—Sequence: SEQ ID NO. KH36.

37. KH37 (New Found protein in GammaRAAS®)—Sequence: SEQ ID NO. KH 37.

38. KH38 (New Found protein in AFCC®)—Sequence: SEQ ID NO. KH38.

39. KH39 (New Found protein in AFCC®)—Sequence: SEQ ID NO. KH39.

40. KH40 (New Found protein in AFCC®)—Sequence: SEQ ID NO. KH40.

41. KH41 (New Found protein in Fraction 3-2)—Sequence: SEQ ID NO. KH41.

42. KH42 (New Found protein in Fraction 3)—Sequence: SEQ ID NO. KH42.

43. KH43 (New Found protein in Fraction 3)—Sequence: SEQ ID NO. KH43.

44. KH44 (New Found protein in FibingluRAAS®Thrombin)—Sequence: SEQ ID NO. KH44.

45. KH45 (New Found protein in FibingluRAAS®Thrombin)—Sequence: SEQ ID NO. KH45.

46. KH46 (New Found protein in FibingluRAAS®Thrombin)—Sequence: SEQ ID NO. KH46.

47. KH47 (New Found protein in FibingluRAAS®Thrombin)—Sequence: SEQ ID NO. KH47.

48. KH48 (New Found protein in AFOD®)—Sequence: SEQ ID NO. KH48.

49. KH49 (New Found protein in AFOD®)—Sequence: SEQ ID NO. KH49.

50. KH50 (New Found protein in AFOD®)—Sequence: SEQ ID NO. KH50.

51. KH51 (New Found protein in AlbuRAAS®)—Sequence: SEQ ID NO. KH51.

52. KH52 (New Found protein in FibingluRAAS® High Concentrate Fibrinogen)—Sequence: SEQ ID NO. KH52.

53. KH53 protein whose KH healthy cells in which the RNA synthesizes good proteins: 1—Send signals to the DAMAGED, SICK, AND BAD CELLS that triggers that synthesis of good proteins that transform these cells to become GOOD healthy cells; 2—Send signals to the other currently undamaged cells to synthesis of good proteins to protect them from being DAMAGED, INFECTED and PRONE to DNA and other cellular alterations; 3—Send signals to the body to produce new cells that are healthy and forbid them from being affected by intra- and extracellular damaging signals in order to cure diseases, viruses infections, bacteria infections, auto immune disease, neurological disorder, all type of solid and blood cancer, coagulation, diabetic, inhibitor, immune deficiency, muscle and nerve repair and restoration.

54. KH54 protein whose KH healthy cells in which the RNA synthesizes good proteins: 1—Send signals to the DAMAGED, SICK, AND BAD CELLS that triggers that synthesis of good proteins that transform these cells to become GOOD healthy cells; 2—Send signals to the other currently undamaged cells to synthesis of good proteins to protect them from being DAMAGED, INFECTED and PRONE to DNA and other cellular alterations; 3—Send signals to the body to produce new cells that are healthy and forbid them from being affected by intra- and extracellular damaging signals in order to cure diseases, viruses infections, bacteria infections, auto immune disease, neurological disorder, all type of solid and blood cancer, coagulation, diabetic, inhibitor, immune deficiency, muscle and nerve repair and restoration.

55. KH55 protein whose KH healthy cells in which the RNA synthesizes good proteins: 1—Send signals to the DAMAGED, SICK, AND BAD CELLS that triggers that synthesis of good proteins that transform these cells to become GOOD healthy cells; 2—Send signals to the other currently undamaged cells to synthesis of good proteins to protect them from being DAMAGED, INFECTED and PRONE to DNA and other cellular alterations; 3—Send signals to the body to produce new cells that are healthy and forbid them from being affected by intra- and extracellular damaging signals in order to cure diseases, viruses infections, bacteria infections, auto immune disease, neurological disorder, all type of solid and blood cancer, coagulation, diabetic, inhibitor, immune deficiency, muscle and nerve repair and restoration.

56. Chain A, The Intact And Cleaved Human Antithrombin III protein whose KH healthy cells in which the RNA synthesizes good proteins: 1—Send signals to the DAMAGED, SICK, AND BAD CELLS that triggers that synthesis of good proteins that transform these cells to become GOOD healthy cells; 2—Send signals to the other currently undamaged cells to synthesis of good proteins to protect them from being DAMAGED, INFECTED and PRONE to DNA and other cellular alterations; 3—Send signals to the body to produce new cells that are healthy and forbid them from being affected by intra- and extracellular damaging signals in order to cure diseases, viruses infections, bacteria infections, auto immune disease, neurological disorder, all type of solid and blood cancer, coagulation, diabetic, inhibitor, immune deficiency, muscle and nerve repair and restoration.

57. Beta-2-glycoprotein I protein whose KH healthy cells in which the RNA synthesizes good proteins: 1—Send signals to the DAMAGED, SICK, AND BAD CELLS that triggers that synthesis of good proteins that transform these cells to become GOOD healthy cells; 2—Send signals to the other currently undamaged cells to synthesis of good proteins to protect them from being DAMAGED, INFECTED and PRONE to DNA and other cellular alterations; 3—Send signals to the body to produce new cells that are healthy and forbid them from being affected by intra- and extracellular damaging signals in order to cure diseases, viruses infections, bacteria infections, auto immune disease, neurological disorder, all type of solid and blood cancer, coagulation, diabetic, inhibitor, immune deficiency, muscle and nerve repair and restoration.

58. hCG1646813 protein whose KH healthy cells in which the RNA synthesizes good proteins: 1—Send signals to the DAMAGED, SICK, AND BAD CELLS that triggers that synthesis of good proteins that transform these cells to become GOOD healthy cells; 2—Send signals to the other currently undamaged cells to synthesis of good proteins to protect them from being DAMAGED, INFECTED and PRONE to DNA and other cellular alterations; 3—Send signals to the body to produce new cells that are healthy and forbid them from being affected by intra- and extracellular damaging signals in order to cure diseases, viruses infections, bacteria infections, auto immune disease, neurological disorder, all type of solid and blood cancer, coagulation, diabetic, inhibitor, immune deficiency, muscle and nerve repair and restoration.

59. Creatine kinase, muscle protein whose KH healthy cells in which the RNA synthesizes good proteins: 1—Send signals to the DAMAGED, SICK, AND BAD CELLS that triggers that synthesis of good proteins that transform these cells to become GOOD healthy cells; 2—Send signals to the other currently undamaged cells to synthesis of good proteins to protect them from being DAMAGED, INFECTED and PRONE to DNA and other cellular alterations; 3—Send signals to the body to produce new cells that are healthy and forbid them from being affected by intra- and extracellular damaging signals in order to cure diseases, viruses infections, bacteria infections, auto immune disease, neurological disorder, all type of solid and blood cancer, coagulation, diabetic, inhibitor, immune deficiency, muscle and nerve repair and restoration.

60. Similar to ring finger protein whose KH healthy cells in which the RNA synthesizes good proteins: 1—Send signals to the DAMAGED, SICK, AND BAD CELLS that triggers that synthesis of good proteins that transform these cells to become GOOD healthy cells; 2—Send signals to the other currently undamaged cells to synthesis of good proteins to protect them from being DAMAGED, INFECTED and PRONE to DNA and other cellular alterations; 3—Send signals to the body to produce new cells that are healthy and forbid them from being affected by intra- and extracellular damaging signals in order to cure diseases, viruses infections, bacteria infections, auto immune disease, neurological disorder, all type of solid and blood cancer, coagulation, diabetic, inhibitor, immune deficiency, muscle and nerve repair and restoration.

61. Chain A, Alpha-1-Antitrypsin protein whose KH healthy cells in which the RNA synthesizes good proteins: 1—Send signals to the DAMAGED, SICK, AND BAD CELLS that triggers that synthesis of good proteins that transform these cells to become GOOD healthy cells; 2—Send signals to the other currently undamaged cells to synthesis of good proteins to protect them from being DAMAGED, INFECTED and PRONE to DNA and other cellular alterations; 3—Send signals to the body to produce new cells that are healthy and forbid them from being affected by intra- and extracellular damaging signals in order to cure diseases, viruses infections, bacteria infections, auto immune disease, neurological disorder, all type of solid and blood cancer, coagulation, diabetic, inhibitor, immune deficiency, muscle and nerve repair and restoration.

62. Chain A, Tertiary Structures Of Three Amyloidogenic Transthyretin Variants And Implications For Amyloid Fibril Formation protein whose KH healthy cells in which the RNA synthesizes good proteins: 1—Send signals to the DAMAGED, SICK, AND BAD CELLS that triggers that synthesis of good proteins that transform these cells to become GOOD healthy cells; 2—Send signals to the other currently undamaged cells to synthesis of good proteins to protect them from being DAMAGED, INFECTED and PRONE to DNA and other cellular alterations; 3—Send signals to the body to produce new cells that are healthy and forbid them from being affected by intra- and extracellular damaging signals in order to cure diseases, viruses infections, bacteria infections, auto immune disease, neurological disorder, all type of solid and blood cancer, coagulation, diabetic, inhibitor, immune deficiency, muscle and nerve repair and restoration.

63. Chain A, Apo-Human Serum Transferrin (Glycosylated) protein whose KH healthy cells in which the RNA synthesizes good proteins: 1—Send signals to the DAMAGED, SICK, AND BAD CELLS that triggers that synthesis of good proteins that transform these cells to become GOOD healthy cells; 2—Send signals to the other currently undamaged cells to synthesis of good proteins to protect them from being DAMAGED, INFECTED and PRONE to DNA and other cellular alterations; 3—Send signals to the body to produce new cells that are healthy and forbid them from being affected by intra- and extracellular damaging signals in order to cure diseases, viruses infections, bacteria infections, auto immune disease, neurological disorder, all type of solid and blood cancer, coagulation, diabetic, inhibitor, immune deficiency, muscle and nerve repair and restoration.

64. hemopexin, isoform CRA_c protein whose KH healthy cells in which the RNA synthesizes good proteins: 1—Send signals to the DAMAGED, SICK, AND BAD CELLS that triggers that synthesis of good proteins that transform these cells to become GOOD healthy cells; 2—Send signals to the other currently undamaged cells to synthesis of good proteins to protect them from being DAMAGED, INFECTED and PRONE to DNA and other cellular alterations; 3—Send signals to the body to produce new cells that are healthy and forbid them from being affected by intra- and extracellular damaging signals in order to cure diseases, viruses infections, bacteria infections, auto immune disease, neurological disorder, all type of solid and blood cancer, coagulation, diabetic, inhibitor, immune deficiency, muscle and nerve repair and restoration.

65. Alpha-1-Antitrypsin protein whose KH healthy cells in which the RNA synthesizes good proteins: 1—Send signals to the DAMAGED, SICK, AND BAD CELLS that triggers that synthesis of good proteins that transform these cells to become GOOD healthy cells; 2—Send signals to the other currently undamaged cells to synthesis of good proteins to protect them from being DAMAGED, INFECTED and PRONE to DNA and other cellular alterations; 3—Send signals to the body to produce new cells that are healthy and forbid them from being affected by intra- and extracellular damaging signals in order to cure diseases, viruses infections, bacteria infections, auto immune disease, neurological disorder, all type of solid and blood cancer, coagulation, diabetic, inhibitor, immune deficiency, muscle and nerve repair and restoration.

66. Chain A, 2.0 Angstrom Structure Of IntactAlpha-1-Antitrypsin protein whose KH healthy cells in which the RNA synthesizes good proteins: 1—Send signals to the DAMAGED, SICK, AND BAD CELLS that triggers that synthesis of good proteins that transform these cells to become GOOD healthy cells; 2—Send signals to the other currently undamaged cells to synthesis of good proteins to protect them from being DAMAGED, INFECTED and PRONE to DNA and other cellular alterations; 3—Send signals to the body to produce new cells that are healthy and forbid them from being affected by intra- and extracellular damaging signals in order to cure diseases, viruses infections, bacteria infections, auto immune disease, neurological disorder, all type of solid and blood cancer, coagulation, diabetic, inhibitor, immune deficiency, muscle and nerve repair and restoration.

67. Chain E, The Isomorphous Structures Of Prethrombin2 protein whose KH healthy cells in which the RNA synthesizes good proteins: 1—Send signals to the DAMAGED, SICK, AND BAD CELLS that triggers that synthesis of good proteins that transform these cells to become GOOD healthy cells; 2—Send signals to the other currently undamaged cells to synthesis of good proteins to protect them from being DAMAGED, INFECTED and PRONE to DNA and other cellular alterations; 3—Send signals to the body to produce new cells that are healthy and forbid them from being affected by intra- and extracellular damaging signals in order to cure diseases, viruses infections, bacteria infections, auto immune disease, neurological disorder, all type of solid and blood cancer, coagulation, diabetic, inhibitor, immune deficiency, muscle and nerve repair and restoration.

68. coagulation factor II (thrombin), isoform CRA_b protein whose KH healthy cells in which the RNA synthesizes good proteins: 1—Send signals to the DAMAGED, SICK, AND BAD CELLS that triggers that synthesis of good proteins that transform these cells to become GOOD healthy cells; 2—Send signals to the other currently undamaged cells to synthesis of good proteins to protect them from being DAMAGED, INFECTED and PRONE to DNA and other cellular alterations; 3—Send signals to the body to produce new cells that are healthy and forbid them from being affected by intra- and extracellular damaging signals in order to cure diseases, viruses infections, bacteria infections, auto immune disease, neurological disorder, all type of solid and blood cancer, coagulation, diabetic, inhibitor, immune deficiency, muscle and nerve repair and restoration.

69. Chain B, Crystal Structure Of Human Coagulation Factor Xa protein whose KH healthy cells in which the RNA synthesizes good proteins: 1—Send signals to the DAMAGED, SICK, AND BAD CELLS that triggers that synthesis of good proteins that transform these cells to become GOOD healthy cells; 2—Send signals to the other currently undamaged cells to synthesis of good proteins to protect them from being DAMAGED, INFECTED and PRONE to DNA and other cellular alterations; 3—Send signals to the body to produce new cells that are healthy and forbid them from being affected by intra- and extracellular damaging signals in order to cure diseases, viruses infections, bacteria infections, auto immune disease, neurological disorder, all type of solid and blood cancer, coagulation, diabetic, inhibitor, immune deficiency, muscle and nerve repair and restoration.

70. Chain A, Crystal Structure Of Prethrombin-2FRAGMENT-2 Complex protein whose KH healthy cells in which the RNA synthesizes good proteins: 1—Send signals to the DAMAGED, SICK, AND BAD CELLS that triggers that synthesis of good proteins that transform these cells to become GOOD healthy cells; 2—Send signals to the other currently undamaged cells to synthesis of good proteins to protect them from being DAMAGED, INFECTED and PRONE to DNA and other cellular alterations; 3—Send signals to the body to produce new cells that are healthy and forbid them from being affected by intra- and extracellular damaging signals in order to cure diseases, viruses infections, bacteria infections, auto immune disease, neurological disorder, all type of solid and blood cancer, coagulation, diabetic, inhibitor, immune deficiency, muscle and nerve repair and restoration.

71. inter-alpha (globulin) inhibitor H2 protein whose KH healthy cells in which the RNA synthesizes good proteins: 1—Send signals to the DAMAGED, SICK, AND BAD CELLS that triggers that synthesis of good proteins that transform these cells to become GOOD healthy cells; 2—Send signals to the other currently undamaged cells to synthesis of good proteins to protect them from being DAMAGED, INFECTED and PRONE to DNA and other cellular alterations; 3—Send signals to the body to produce new cells that are healthy and forbid them from being affected by intra- and extracellular damaging signals in order to cure diseases, viruses infections, bacteria infections, auto immune disease, neurological disorder, all type of solid and blood cancer, coagulation, diabetic, inhibitor, immune deficiency, muscle and nerve repair and restoration.

72. KH 53 new found protein and its sequence: SEQ ID NO. KH53.

73. KH54 new found protein and its sequence: SEQ ID NO. KH54.

74. KH55 new found protein and its sequence: SEQ ID NO. KH55.
